United States Patent Application Publication US 2022/0211063 A1 - sequence listing, part 20

SEQ ID NO: 56 - DNA, 7752691 bp, Penicillium roqueforti (residues 1-1,938,173 of 7,752,691)
  misc_feature (471)..(2988): n is a, c, g, or t
  misc_feature (125072)..(125245): n is a, c, g, or t
  misc_feature (177056)..(177831): n is a, c, g, or t
  misc_feature (384173)..(384363): n is a, c, g, or t
  misc_feature (555910)..(555935): n is a, c, g, or t
  misc_feature (601324)..(601424): n is a, c, g, or t
  misc_feature (676814)..(677158): n is a, c, g, or t
  misc_feature (719555)..(719754): n is a, c, g, or t
  misc_feature (1142719)..(1142936): n is a, c, g, or t
  misc_feature (1186267)..(1186889): n is a, c, g, or t
  misc_feature (1335750)..(1335921): n is a, c, g, or t
  misc_feature (1623850)..(1624038): n is a, c, g, or t
  misc_feature (1638010)..(1638177): n is a, c, g, or t
  misc_feature (1653190)..(1653311): n is a, c, g, or t
  misc_feature (1825514)..(1825694): n is a, c, g, or t
  misc_feature (2226312)..(2226460): n is a, c, g, or t
  misc_feature (2393310)..(2393476): n is a, c, g, or t
  misc_feature (2448029)..(2448167): n is a, c, g, or t
  misc_feature (2535304)..(2535417): n is a, c, g, or t
  misc_feature (2536977)..(2537199): n is a, c, g, or t
  misc_feature (2854098)..(2854136): n is a, c, g, or t
  misc_feature (2984508)..(2984757): n is a, c, g, or t
  misc_feature (3020810)..(3020969): n is a, c, g, or t
  misc_feature (3033643)..(3034020): n is a, c, g, or t
  misc_feature (3159237)..(3159358): n is a, c, g, or t
  misc_feature (3215468)..(3215733): n is a, c, g, or t
  misc_feature (3224528)..(3224830): n is a, c, g, or t
  misc_feature (3317372)..(3317652): n is a, c, g, or t
  misc_feature (3542053)..(3542228): n is a, c, g, or t
  misc_feature (3623060)..(3671559): n is a, c, g, or t
  misc_feature (3674099)..(3676135): n is a, c, g, or t
  misc_feature (3690909)..(3691143): n is a, c, g, or t
  misc_feature (3731654)..(3731912): n is a, c, g, or t
  misc_feature (3988980)..(3989155): n is a, c, g, or t
  misc_feature (3991939)..(3992050): n is a, c, g, or t
  misc_feature (4101299)..(4101736): n is a, c, g, or t
  misc_feature (4338887)..(4339016): n is a, c, g, or t
  misc_feature (4339394)..(4339698): n is a, c, g, or t
  misc_feature (4384061)..(4384223): n is a, c, g, or t
  misc_feature (4533678)..(4533904): n is a, c, g, or t
  misc_feature (4697041)..(4697211): n is a, c, g, or t
  misc_feature (4793826)..(4796541): n is a, c, g, or t
  misc_feature (4802143)..(4802515): n is a, c, g, or t
  misc_feature (5082574)..(5082717): n is a, c, g, or t
  misc_feature (5096756)..(5096912): n is a, c, g, or t
  misc_feature (5239501)..(5239639): n is a, c, g, or t
  misc_feature (5277854)..(5278038): n is a, c, g, or t
  misc_feature (5381189)..(5381388): n is a, c, g, or t
  misc_feature (5479369)..(5479800): n is a, c, g, or t
  misc_feature (5512360)..(5512556): n is a, c, g, or t
  misc_feature (5631285)..(5631372): n is a, c, g, or t
  misc_feature (5721770)..(5721994): n is a, c, g, or t
  misc_feature (5728887)..(5729032): n is a, c, g, or t
  misc_feature (5774080)..(5774169): n is a, c, g, or t
  misc_feature (5808546)..(5808590): n is a, c, g, or t
  misc_feature (5833022)..(5833139): n is a, c, g, or t
  misc_feature (5846579)..(5846770): n is a, c, g, or t
  misc_feature (5859707)..(5864428): n is a, c, g, or t
  misc_feature (5865409)..(5948408): n is a, c, g, or t
  misc_feature (5948989)..(5949423): n is a, c, g, or t
  misc_feature (6008477)..(6008565): n is a, c, g, or t
  misc_feature (6324500)..(6325221): n is a, c, g, or t
  misc_feature (6373350)..(6373710): n is a, c, g, or t
  misc_feature (6805689)..(6805691): n is a, c, g, or t
  misc_feature (6847122)..(6848137): n is a, c, g, or t
  misc_feature (6999671)..(6999803): n is a, c, g, or t
  misc_feature (7043433)..(7047240): n is a, c, g, or t
  misc_feature (7056977)..(7057482): n is a, c, g, or t
  misc_feature (7108384)..(7109155): n is a, c, g, or t
  misc_feature (7114292)..(7114980): n is a, c, g, or t
  misc_feature (7152070)..(7152265): n is a, c, g, or t
  misc_feature (7347420)..(7347526): n is a, c, g, or t
  misc_feature (7355683)..(7355687): n is a, c, g, or t
  misc_feature (7379165)..(7379439): n is a, c, g, or t
  misc_feature (7441586)..(7441811): n is a, c, g, or t
  misc_feature (7524935)..(7525054): n is a, c, g, or t
  misc_feature (7750548)..(7752461): n is a, c, g, or t
tccctactataagtactcaaaatttcaaagggttaaaatatagttaagaggtagttatggtgcgtacaagaaaattacccttttaggataactgagctcaaaatataggtgaattttaatcgctcgctataggcgcaatctttgtctaaattaaaagtagtaaattggatgcacaaatttaaggtccctactataagtactcaaaatttcaaagggttaaaatacagttaagaggtagttatggtgcgtacaaaatatggccgaattaggttagtgtcattcttcccgtagccctaaacctcaaagatataccttaactttaaccacgaatttcagacgctacactagctggatacgaaagataagatatgatctagaatgcttaagaaaagggctttctagtgatactaaaataatagtaaatactcattattttatatgtacttaggctctatgatttcctatatagannnnnnnnnnnnnnnnnnnnnnnnnnnnnnnnnnnnnnnnnnnnnnnnnnnnnnnnnnnnnnnnnnnnnnnnnnnnnnnnnnnnnnnnnnnnnnnnnnnnnnnnnnnnnnnnnnnnnnnnnnnnnnnnnnnnnnnnnnnnnnnnnnnnnnnnnnnnnnnnnnnnnnnnnnnnnnnnnnnnnnnnnnnnnnnnnnnnnnnnnnnnnnnnnnnnnnnnnnnnnnnnnnnnnnnnnnnnnnnnnnnnnnnnnnnnnnnnnnnnnnnnnnnnnnnnnnnnnnnnnnnnnnnnnnnnnnnnnnnnnnnnnnnnnnnnnnnnnnnnnnnnnnnnnnnnnnnnnnnnnnnnnnnnnnnnnnnnnnnnnnnnnnnnnnnnnnnnnnnnnnnnnnnnnnnnnnnnnnnnnnnnnnnnnnnnnnnnnnnnnnnnnnnnnnnnnnnnnnnnnnnnnnnnnnnnnnnnnnnnnnnnnnnnnnnnnnnnnnnnnnnnnnnnnnnnnnnnnnnnnnnnnnnnnnnnnnnnnnnnnnnnnnnnnnnnnnnnnnnnnnnnnnnnnnnnnnnnnnnnnnnnnnnnnnnnnnnnnnnnnnnnnnnnnnnnnnnnnnnnnnnnnnnnnnnnnnnnnnnnnnnnnnnnnnnnnnnnnnnnnnnnnnnnnnnnnnnnnnnnnnnnnnnnnnnnnnnnnnnnnnnnnnnnnnnnnnnnnnnnnnnnnnnnnnnnnnnnnnnnnnnnnnnnnnnnnnnnnnnnnnnnnnnnnnnnnnnnnnnnnnnnnnnnnnnnnnnnnnnnnnnnnnnnnnnnnnnnnnnnnnnnnnnnnnnnnnnnnnnnnnnnnnnnnnnnnnnnnnnnnnnnnnnnnnnnnnnnnnnnnnnnnnnnnnnnnnnnnnnnnnnnnnnnnnnnnnnnnnnnnnnnnnnnnnnnnnnnnnnnnnnnnnnnnnnnnnnnnnnnnnnnnnnnnnnnnnnnnnnnnnnnnnnnnnnnnnnnnnnnnnnnnnnnnnnnnnnnnnnnnnnnnnnnnnnnnnnnnnnnnnnnnnnnnnnnnnnnnnnnnnnnnnnnnnnnnnnnnnnnnnnnnnnnnnnnnnnnnnnnnnnnnnnnnnnnnnnnnnnnnnnnnnnnnnnnnnnnnnnnnnnnnnnnnnnnnnnnnnnnnnnnnnnnnnnnnnnnnnnnnnnnnnnnnnnnnnnnnnnnnnnnnnnnnnnnnnnnnnnnnnnnnnnnnnnnnnnnnnnnnnnnnnnnnnnnnnnnnnnnnnnnnnnnnnnnnnnnnnnnnnnnnnnnnnnnnnnnnnnnnnnnnnnnnnnnnnnnnnnnnnnnnnnnnnnnnnnnnnnnnnnnnnnnnnnnnnnnnnnnnnnnnnnnnnnnnnnnnnnnnnnnnnnnnnnnnnnnnnnnnnnnnnnnnnnnnnnnnnnnnnnnnnnnnnnnnnnnnnnnnnnnnnnnnnnnnnnnnnnnnnnnnnnnnnnnnnnnnnnnnnnnnnnnnnnnnnnnnnnnnnnnnnnnnnnnnnnnnnnnnnnnnnnnnnnnnnnnnnnnnnnnnnnnnnnnnnnnnnnnnnnnnnnnnnnnnnnnnnnnnnnnnnnnnnnnnnnnnnnnnnnnnnnnnnnnnnnnnnnnnnnnnnnnnnnnnnnnnnnnnnnnnnnnnnnnnnnnnnnnnnnnnnnnnnnnnnnnnnnnnnnnnnnnnnnnnnnnnnnnnnnnnnnnnnnnnnnnnnnnnnnnnnnnnnnnnnnnnnnnnnnnnnnnnnnnnnnnnnnnnnnnnnnnnnnnnnnnnnnnnnnnnnnnnnnnnnnnnnnnnnnnnnnnnnnnnnnnnnnnnnnnnnnnnnnnnnnnnnnnnnnnnnnnnnnnnnnnnnnnnnnnnnnnnnnnnnnnnnnnnnnnnnnnnnnnnnnnnnnnnnnnnnnnnnnnnnnnnnnnnnnnnnnnnnnnnnnnnnnnnnnnnnnnnnnnnnnnnnnnnnnnnnnnnnnnnnnnnnnnnnnnnnnnnnnnnnnnnnnnnnnnnnnnnnnnnnnnnnnnnnnnnnnnnnnnnnnnnnnnnnnnnnnnnnnnnnnnnnnnnnnnnnnnnnnnnnnnnnnnnnnnnnnnnnnnnnnnnnnnnnnnnnnnnnnnnnnnnnnnnnnnnnnnnnnnnnnnnnnnnnnnnnnnnnnnnnnnnnnnnnnnnnnnnnnnnnnnnnnnnnnnnnnnnnnnnnnnnnnnnnnnnnnnnnnnnnnnnnnnnnnnnnnnnnnnnnnnnnnnnnnnnnnnnnnnnnnnnnnnnnnnnnnnnnnnnnnnnnnnnnnnnnnnnnnnnnnnnnnnnnnnnnnnnnnnnnnnnnnnnnnnnnnnnnnnnnnnnnnnnnnnnnnnnnnnnnnnnnnnnnnnnnnnnnnnnnnnnnnnnnnnnnnnnnnnnnnnnnnnnnnnnnnnnnnnnnnnnnnnnnnnnnnnnnnnnnnnnnnnnnnnnnnnnnnnnnnnnnnnnnnnnnnnnnnnnnnnnnnnnnnnnnnnnnnnnnnnnnnnnnnnnnnnnnnnnnnnnnnnnnnnnnnnnnnnnnnnnntagtaaattggatgcacaaatttaaggtccctactataagtactcaaaatttcaaagggttaaaatacagttaagaggtagttatggtgcgtacaaaatatggccgaattaggttagtgtcattcttcccgtagccctaaacctcaaagatataccttaactttaaccacgaatttcagacgctacactagctggatacgaaagataagatatgatctagaatgcttaagaaaagggctttctagtgatactaaaataatagtaaatactcattattttatatgtacttaggctctatgatttcctatatagaggggcctaataggctgaatataatacaaatataccaattcttagcatttatataagtaatatagattttctaaatattaattatatataaaaatggacactaattgtgggaaatcagctagcttttggtataaaattgaattcaataaacctaaaaataagggtttctataattaaaaatgttatacttaaataggaagatatacctacttctactcatatatatctatatactaacgcctactaatcctctaagtactagaatagtattagttgacacggtgagcggggcgctggaaccggctcccattgcaccgcccctctgccgcccccgaccgcctgcctgtctccactatccccttgccccttccggtatggcgccatctcctctagccccgtttaggtttagtgccgtccctggccgctttactgcctctgcctacttgccgtctatctataaaagactgctcgccctctccatctcttgtcgacgcactttctcttctcttttttcccttctgcccccctttctttttttctttctcgcccttaccgtctcctgcgcatttggctttcagcccgacgcactgcccctttcattttaccggagatgccgctcgatccgacgccgtggtcgttcggaccagcgtgggctgcaatgctatccagtcgctcaggaacagaaacactgcggtgatctagccatccatcgcatcgcattattttgtgtcaatacttcattttccaaagaagtctacgaagctatctagatcgctttctgctggtgagaccttcccgttcagtggtctgttattccgctggcatcccttgttgcgaagtctccccaattgccctccttgatgctgcatgctctgcttcatccgccccatcgcggtccccacctgaggttacattgcacagcccttggcgtcgcagatctactctcggccgtaaacgcctcgacccccaatctgtcgtcatcgtcggcctctccggtgtattcgcacccaattgatccatctcggcagcatgccacggtcatgcgagccaatagcaaaaataccgcacattcgcctgaccccggccaaatgcagcgtcgtgaggtcaatgcctggccgggctatgataagacctcacgatagcacagtctggcgaatagaggctttgctagcgacagccgtgggcataggtcattggtcgggagccatcagcgagattggcaggggttgttgcaggtgccctaaagctgaaaaagaaacttgtgtcgtctcacaactttggacgcatcggcatgggttgcaggagatggtcggcgtcttctgcgctatgaagtaggcggattacgcctcgtggtctataaaagagacgacgattcctcccaagtggcaaatctgtaatcccaccttcccaaattctcccacctttccattctcaccgtgccctacccactaccacatacccaaaatcccgatcccgttttctctatttctacgagtggtcccgattccattatatcgtgtacttgctcagcagcctttttcacaatatgtcgagcgatagttttcgcttggaatctttccggccgtggaatcctttccaggacaaagcgcagcctctgcggaattctctcgatatttgtcgttatccaagtcctgtctcgatcactgctacctcgcctccctccaattctagcaactcggcctcgacgaacccaaattttcattttcataaacctgagcgacacccccttcctccccgaccaccagtggaggcttgcttgaatgacagcctaccacaggagataaacactcagcaccaacccgctatgcaggatcagacattatgtgttaaccccggagttcaggcgttcgacttcgaggatattcgccaactgcaggatttaccaagctctggagacgaagaccgtccgatgatctatgataatctaggcgcagagtctcagcacccactcgactttgagtcaggcgatccgggattcgcttgcactaccagtcagcactctcatactggcattactagaagttctgttctgacgagcgagtgttgcgacgcaacaattgatccggcaatcctgggtgattaccatttccgagatattgagcagaccccagcaagaaaagacactgacgttgtggtcccttctcgttcgtcggataaaactgttcgtggccgcagcatgcgaccaaaaatgaaaccaaggcggcagtggtccaaaataaacaaggtttctgtcgtcgtggacaatcgccacgtgaataggactggccggagcactcgagcaaacggccccgttaaaatgtcgttttcaattcttcgggatcaattctcttctctaccggtcgaagagcaactgcagttcttgtcctggctgtttcagggtgctttgtcccaatgcctccatgcttcatccagcgcggatggcgcatcggcattaggttctatctcgggagaggaagaaacctcgactccaccgcctgcgcaaccattcgcaggtgccaacgtggtcgatatacagcatcctggctcctcgagaaaaggactacctttcattccggaagaggatcgccttctggtgaagcttaggaaggaagacgctcttacctggtcggaagtgatcaagcgattcagtcggaagttccctggaaggagcaaaggctccattcaggtgcactggagcacgacgcttaggaaacaactgctgtcttaagctagaaatgcatataggaagttttgtcgatttgctgatacacggtcatgttatttcaagtattgttgtaaaccacccctgtctccatttccaatttccaagtacttctttgcattgcattgcacagctcctaatgttgtagctattccccagcctccttctttcgaacgctgatttatattctgtccttatttttgggcgtgttcgtgcgaaaggtaacagtttcatgtttgttgagctcgaagaaggcataatgaaacgaccgcctttcttaggcctattatggcgatttggaactatgaaacatgtgagtaacttgtgatgttggtttagtgaaggtatgtaccgtcgcaatttgaggctgcaggctggtatgtatgcaggcaagtatcgtcaagcctaacgaaataagaaacaaccctattgagccaatggacgccacccacaaggctcgttgatgcctggcagcagtgaggagcggataatgccagaataatttgaatgtattcgtttcgatatgccatggcctcatgcatattatccaggctctaataacttgggcgtgaatgaacccgagcccagcaaaagcgaagatcataaatgaagaaaacaaagctctgcgatgctcctgtcatttattgattaacaaattatatcaaaaggaaggcagctagttaaacgtaccgaaaaagccatagaaaataatagaatggcaactgttcctacaaacaataaggcagatacgatatgggctaaccagtgttgcaaagtagaaacacttagatactgacagaggtcagtgttgctcttcttctgttttcaccattctcacctcattcaaaatgagcaaaagaagcacactatcaacttccagctgtagcatccgctgagacagatctgaaatgtgattagtgaggaaactgatttcagcatagaaagcaacttgccgtattttggatctgctgccaacagtgccaggaaaacagaagtgattgatcccagaaacacgaaaccacctatcacagcttgactagagatgagtggttccttgctaagcctttgcaagctcatagcgtcaatcgacaggagccagaaggcaagacttgctccgcagaaaattgatgctattatcgacgcagtcagttggaatatcacctcagagtccatttttatgttgacactttcattgagctcgatctacacggtccatgccgctatttaaataaagagccctttacttccctagatctcgctcaatccgacaagggggcgtgcatctgcagctcgttcttcctatgagagacgtccccattatctttccgggttgcgatattgtgatggggaaacgtgaaatagcgatacttcctagtcatagacaatgatcagctgctgaagtcccaaaaatggcccacagccccacctctatcccaccatccattggcgcattggcggtgcacgtcagcaaacttaggcagctataaacttagacatcctctaaaactgtggcccataatactttcaatcttccaactttccaactttcaaaactaaacgtcgacatccatatcacaaaattagccatggctgctatcatcaatcaattaaactccgttgctagagatctggatgccttgaacttagcgatgcgtgatatctctttgtccgggaccgacctgcaaacgttggaaacggtcgctgcaaacctcaaagacatcattgttgtcatcgaagcaaaagcaggactacggaagcgcccatggatggagcaggcgtggaaggacagtgagccttacagactcaaagcgcaatccataattgccacagtgctcagcaaaggacggttgcacaatccagcggtattccgcaggaacatcaagttaatctactgcgggtcacagcaatctgagttcgattccaaagataccaagtggaggagaggtgtggtccagaaaagatgttctaggattcaacaacttagcccagatggaattgtctcgtgggctattgcttatcctccaaccacatggggaccatgctttatgtcaaatgatacttttgactgcctcatagaggatattgagccaagagacaggaagaagtggccggacgcagtatgtcaaacactttccagactgaaggacggggaagttcaggggtgctacagtcttgagcagctcgtgcatagtaagaggacccttggaagaggcttttctgtaactgacactccgttagacctagagaatccatcccagcaagatgaattcactaatcccgatatgcctatccaggcagttcaaacagcgcctcggaaccccgacaacgaacaccgaggtaagacatatcgcctgcgttgccggatatattttgattctttacagagatgaagcacatgttcacaaacgccccaaatacgatggtgatgcaactaccgcaaccattccgtgctgcagttcaaaatagtgcgctgtggaagtgggaaaggtctcagggacacgggacaacagcttgcgtggcaacacttttcccgaaggacgaaacacaggatgtatcattcactatctgggttggtcacaatgatgggtatagactgaatgacacctatggcgtgaagcatgcactttcctcctaaactatccagcagacaatttcaactcccctcacatacgtcgtgtagcccttcggaactgcgaaatttttgtactcggtgacattctcctcgagtatttttcgatcctgcgcgtcttcgttgaatactgatatgtatagtccttgaaatttgattgttctgtcattttccgggtccggaggaaatcgatggctagcaatattccgttcttcgcgcccggcgagggcttcgtcacccttctgaaaagcgtgtcagtcaagaatgaagaataaggatttgatggtgaatcaaactaccatagtgcaactgtagaatatcaagcaagctgatcaacgttgttcaattttggaatggttttatgttttcgatcttccttcctggtgcgacctttcgttctggtatttgaagagagtggggtatgacaacccagattgggcagcaagtcaacggtggccagcgcaatgcatcgcgtatttgtgcgccaataattgttgtagtagtatcccagaaatacccaagttaaggtagctatggcccaaacgtagggttgacaggcttgaatagcagttctgatgatgttcttgggagcaggtcgacgtttggtcctcgcgtaccaagttaagaggatcataagggacccacatcagtcggatcaactcggggtacagataattatgccccgttacaaagccattacataatttttgactcaagtggtagactaccaacttggctacctactacttttacagggtcccgaagctatcttaccactaataacttggctacctaccacttttacagagtcctaaaactatcagtttctaagaacgaggctcgatgtcgtttattcaggtccaaaagcgacgccaccaactgaatgattcctgaatccatccaattgagggtggtattacttcatatgctatgcaccatgaagcacactcccatgcagctgaacaccgaatacgtggggggaagcaacgtcttgctcgaacggtgactagactcagcatccaaccaaccaagcatataaggccccgcgaattcccatgtcctcaaaccttggataacacatcaaaataccgttctctcctcattatcatcacagccacgaataccattcgattctcgtatacacaatgaacgccatcagcgggggtggtgcccagatgtctcttatagatgtcctctttcccggtttcagtatggcctctgcctccgcgcagcagcttcttgctggtaacctggacagctacactcggctcctttgtaccttaggaatgcttgtcctcttcactcgctatgcagtccgctatgttggggagctagtgagaagccacttcagttcgtaattcttcctttgtgatgggatgagtctgacagccaacagcttcgacaatccatgtctcatattatgacgaagcgtacgatatgctagtcgactggatagcctaccaaccgtttgtccgcaatgctcactcagtaattgctcgtgtgagatctccacagcgaacaactatccaaagccaagaaaagaagaaacctttgacattttcgccttaggatggatcctttcctttttggtataaaggacacctactcatacttcactgcgctgtcaaagaccatcgagaagacatctacatctcctccattggcctttatccaaacattctcaaacagctcgttaaagagtgccgagggaattaccttaataacattaacaaaaagatcactgtctttaagcactgtgaaggggactagaagaaaactaggttgagaccagttcggcccgtcttaacagtcattatagacaaggaagtacaagatgaccttttaagagatatgaaggacttcctgaatgaagatacacagaagtggtacgccgaccgcggtatcccctactaacgaggctaccttttatatagacctcctggaaccagaaaatccagcttcagtctatccctggccggggaatttaaactagatatttatacgctttaactatcagggatttctgacagcaagctgataaagctattttctgagcttccgctgcactgcatcgttcttctagaggacgtggacgccgctaggatagggtgcagggacgactccgatacagaccaagaggataagtcaacctctagagtcaccctatccagtcttctaaatgttcttaatggtatatcatctcaagaaggtcgggtgcttgttatgacgactaatcatatcgaacatctagatgaagcactcattcggcctggccgcgcagacaagaaagtatatttccagcttgccgataagaagatttctactcaactatttcacatggtcttcaagcagacggcagaccacaaggggtcaaagcatgaatgcggcgataaggcgattgagagacttgccaataactttacttccaaggtgccagaccaagttttcagtcccactgaggttttatcgttcctattggagcagaagaactcgccttttagcgctgttactagtgttgaaaactaggtagcgaagacaaaggctaggagccaactgaagagagagggttcctaggtacaagaaggacgttaagaactaggaagagagggcacccgcgcaatagagaggcaaaggggcataacaccgcgacgacatttcgtttatagacaggactgaccaagcctatgtcgccaattggatgttggtttaatatttgaggcgcttcactatttttctggttttttccctgccctttagatactttgaccctgccagtctttttcttggcccatcgatcttagcccatcgatcttaggcccccactctttcagttatttcccatactttcactccttaatttgaacacatttatcaacttcaacctgtattagccagtaggtagcttggagtcctatttggccaatgctcgcgctaagagaagctagatctccgcggaggaacttgatgttaaccacagagccctaatgcattgggcaaggctcaagcgcatattcaagatcgcgaaacaatttgatgtggtgctacttttggatgcattcatggagcgtccgattgcctcccatggaagttacaaccgccttgtgactgcctttttttgcgaaaccttgaatactatgaaggtatcccgtcctattcttgaccgccaggctgcagcccgaatcagttcgatatcccttattaccggacgccgacacagcgttgatgtcacctcaagaaggtcgggtgctcctcatgacaacaaatcatatcgaacaccttgacgaagcacttttttgtctaacctaaccctaaccgaataatttcttcctccaggtgttcgatatgatttgttgtcatgatgagcacccgaccttcttgaggtgacactctagcaaacttgtgcaggaacgcataattatcatgtattatgcgataactaagccaataatgtaaacataattcctcccgccccatgatctgacggtatggtcgtcaaccgagtcgactaacgcggtggtctgtggtctgatggtcatcatatgtagggaactgtcgagctagacaagagcttttgcttgctttccccgtgccgacgcgataactacgccaggtattgccagaagttgattcaagaacccgacggcgcttcaataatttcacatcctctaagtcaatgacaattaactggccactgaggtcatcccacaatatattgcgccactcactgtcgttgtggacaactctgtgcgaccggagcacggtcagagctttcttgcgctcctggttgaagaaactggaattctcgttattaattatatgctgaagccgcgttcctgaccagctcaagaccattatctcggccattattttaccatggtaccaatacgcgacctgtggctggaaggatccaagacagatggggatatgatgtccttgtaagctcctgaggtgacgataattgtccgcctccgcttaaaggcgatgctgcttctccactatggtagctttaatgaccacagtatatctgtgtgatagaagggtagctttaacgaggtaacccgtccaaccatagacgtggagttgttcaaacctatggtttcggttttaggcaagttgacagtgaagccggcgtgtgaactcatgcggtcccatggggtgtctctgtccactgtggagtttccagttagggcattctttatctagagggtctcggttaaccatgccgcggatgcaggcaattgtgcagtagggtcgtgtagattgcctgtcttttcgagaggtctgtttgttaccccgactggctcgtgtgctttcgctttccttagtcgattgacggttattgcctcggtcgcggctcgacctgctgtgagtcgctgctgcgatagatggcgaatacgattctttatcactgccgctgccttcggtcgacgaatgctttagagtagacatgtctggtttacagcgagtacgggatcgtgtattatgtgtcttcggctctattttccagtgcgagggttgataattggaggctcgagggtctttacggagagtctcggggatttttctcaatacatccaggtattcgacctcctaggtctttagtgtattatatgccacattatgccactcttgagacggagcttcagcggctagcgcttgaagggtgaatgcaagtacctgaccgatagcggtccggtggaggcgcaattcatcgtccgcctgtacgtcctaattcgggatatatataaaatattgaacaactgtgggattatcctccgggatatagagaaaaacaaaagcctccctggtgtagatgtagccgtattagaccccactgtcgatcatatatgagaatatctgagtgaccacagcggcgacgaggtaggtggcataaaacttaaacgtatcgccttcctggttaatgacatcgcgagctggatctatctggtgtagacctgccaccaattcggggattgttaccttgtgcggtgctttgaactctaccgtatatactggtatttgtcgttcatcagccacaaggtgtacgcagaactggtcggcacgacgattacgtcttcgtgcagtgctatccctcctttttccctgtgccccttttcttccccttcctctgccctacccaggcttagtgttcgcgagtcggtggggtgttcgcgtgccctgaagattcatttgctccaagccgttcttcagcgaaatttccgatgggttcacgcggtcgtaaaaggtgacttggccttggattctaaacttatgtcgaaaggcttcatcatctcgcaaggccttgataaccatttcaataaaattatccaccgtgtctcgctcaaaatttcgaagggacgcttccgaataaatcgacctgttctggatattcgtaacgacataatctatttgggtattagaagggaagagagggtgtgaggtaaaggcagccgtgcggtcgaatttcctccagacttgctcctggagctgagggaaattaagccaagggactatgcgcttgggataaagtctgttcactgggttggtcgcatcgccctgagtcgtgagggttgcatccgtctcgactcggatcgcttgcgataaagagttgtgacagcgatcgagaaggcgaaacagtgtattaggctccactcgccgctctgcctcttctcgcgcctttttctcttcttcttcacgacgctctgcctctcctcgcgcctgtctctctttctcttcacggcgctgtgcctcttctcgcgcctgtctctcctcctcaagctgacgtcgtagatcggcgattgtttcttccattgcttgttgaaatcactattcggtaaataatcgaatgatgtaaatcaaagtcaacatggtagggagttcgctgtctggctcgggagagtgacccgtcaaggcggaatgcgtccagatgtttaccaaccagcttactcaccccttggctcgagtcgattcatgcctaaggcacgaaaggcaccaacacgctttggcctttttaatggagcaacaccaggaactaaatacaaatcctcgcagttcgaactcagcaaaaagccactttatacattatatcgaggtcctaaaatttctgcaagttttgagcgcaaaaagtcaggcaccactttttgttactttggctgattcatacctcacggccagggacagtgaagtgcacgtgatgaccaccttatgtatcgccgtggctaacataagccaacaagcaagaagggcatttggatcgtaggcctggggaatatggtataaaggggaacttgtatgcctagccaggtgaaatgccccgaaacgaagcaacggagtgaaagggattacaaccgtggatctgcgtgaaaggctgagttgacgttagaaacacagccaattttcgcgtcgtcagtaccctacagattagaaaaactactgacgaagacagcatctcttctctctactagtctactagtctactagtcattggagaggatttgttgagtggacgcacaaaatcggcactgcacggtagtcggcctctaccagcagacataggcagcaagcatccatgccccgtaatgcgcagaatcggccatgccatttcgcgttatatttcacccggtcggggctagttccaatcaggtcttagactcgggccggtccagctggctgagctatgccccctcccaataccccgcagaagacagtcaaagaacactcgagtcgcccggaagttgaatttcaggaacacagctttcaattcacggaaaaagatggcgtcttactgcccccgatgctaaaaaagctttcctctttttttcagccagacagcagcatattagagactccctcaaccatcacgtttgccatatctgctcatctcctcctgattatgcgacagaagatgaactagatgagcatctacaagatgagcacaatatttatggaaagagatagctcagttgacaaatttcttcgccttgtcagatcttgcattgccacagccacatagacggttctatgatgactcagttttatcttttcccttgatatatctcatttattataaacaaccttcgggtactgtcctcctggcaacattggccgttttctctccctccaaaaacaggaggctggggcctttccgtctgaagtacgcatgcatacgttaggtgaaatctcggactttccatcttcccgcaccgcccggcggtaaggaacatttaacaagacgcggactcgctgcctttgcggtgatatgcttgctctccaccaaagcagtcattgtaggattggcggtcataaagaccgctcagtcagtctaatttgaagccctcgcattcttgagggcatatggtttattttattggcatccccgaatctccacctagtcccactgatccccacctgtaatacacaacgtacctagtatttcaatgtgttttagagatggtcaaaatgtggttagcgtatctcttaatctcgctgatagtgccactagaccaaagtaggcagcaccatgtctgttatccccctcagtcaccgccatttcccgccattattctaccacacaaaaattatggtaattattcaaataactaatattcagtgtaccgtccattagattcaataatagcctgcaccctccgtggcataccctgtgatagaccttactaaggtcgagttgttgccaggcctcctttgcattaactaactaactggttaacaaagtactcggtagttctagtcgtcgcctactgacaggcactcttccagactatatctgtgacggccaagggggtagttgagggatatcatcaaatcaatacaattacttttcaaggagtgattggcagcgagctggggaaccacgcacgaagtaccgcttaaaacaaaaatggggggagtaacactagactactctgtccactcaggctgcctagtcttctcagatcactctgtccattcaagtaccttatcctttcgtgaggatccacaatagttctgttgcccgacttatacatttgttcatgacggaaatctggcggtacaacaatgtacgggtaacctcagtggtattgagctctctaactaacaaaaatgacaaaaccgcgaaaataaacaatctgtgcggaccatgatgactaactgtaacatatacttttgtactgtatcgcttgtaccatcggtcacatgattttctgggtattttaccctgtctcaaccatgtaaactaaccttggcattcgacagttcactccactcctacagacctatatacgtcacgtgacgcaggatccaactctctggggcctatgcagggtacagcacgtcagtcagtcgaagcccataacagtatcagctgatgctggcaaattgggcttaacgttggtcgtgcttgtcatactcgcggcaagccctttttttttccagtgataaaccaatggccgactggaattcatcacgtgttatgacggtgttatgtttgcactgtttgctcttgtcgaacaatacataaagcccgtgaaatcctttgttgcacttcggcggcatcatttttgttcaccgagatggataacgagcttcaatcgatcattgaactaccaactattgccgacattgaggcatcgaccgatgtccttagtatacgaacaaatgccatcaaagtggttcgagtgaaggaacgcttcgcggtcaaaatcgggtattcgatcccgcctttggaagctgagaacatgaaatttgttgcagccaacagcaaggttcctgtaccaaaggttcacgccaacttcatcgacccagagacccagaaaagatatgtcgttatggatttcgtccctggtacagacttgcagaaattactgccatcgctcaccccaactgagaagacgacgatcagccagaggatcagacaggcgatcaatgaactgcgagcaataccatcacctggctactttgggaacttgaatggcacgccttacatcgacggtgttctttcaacccctgataacaacccaatcatttccgggccattcaaggaccagaagcagatgaaccaaggaatactggagagactgggccaaatgcagtctccacactacattcgattgttgaaagaaatggtcaaccgcactctcaagaaccatcgaattgtctttactcatggagatctgcaaccgaagaacataattgtggagcgaaaaggggtctgctgaggatccacaatagttctgttgcacgacttatacatttttcactccaccccaacagatctatatacgtcacgtgacctgaaatccaactcgctggggcctatgcagggtacagcacgtcagtcaaagtccataacagtatcagctgatgctggcaaatttgggcctaacgctggtcgtgcttgtcatactcgcggcaagccctttcttttccagtgataaaccaatggccgactggaattcatcacgtgttatgacggtgttatgtttgcactgtttgctcttgtcgaacaatacataaagcccgtgaaatcctttgttgcacttcggcggcatcatttttgttcaccgagatggataacgagcttcaatcgatcattgaactaccaactattgccgacattgaggcatcgaccgatgtccttagtatacgaacaaatgccatcaaagtggttcgagtgaaggaacgcttcgcggtcaaaatcgggtattcgatcccgcctttggaagctgagaacgtgaaatttgttgcagccaacagcaaggttcctgtgccaaaggttcacgccaacttcatcgacccagagacccagaaaagatatgtggttatggatttcgtccctggtacagacttgcagaaattactgccatcgctcaccccaactgagaagacgacgatcagccagaggatcagacaggcgatcaatgaactgcgagcaataccatcacctggctactttgggaacttgaatggcacgccttacatcgacggtgttctttcaacccctgataacaacccaatcatttccgggccattcaaggaccagaagcagatgaaccaaggaatactggagagactgggccaaatgcagtctccacactacattcgattgttgaaagaaatggtcaaccgcactctcaagaaccatcgaattgtctttactcatggagatctgcaaccgaagaacataattgtggagcgaaaaggggtttgcaacaatggagacgcagacttcaaagttactctgatcgactggaatttgtcaggctggtaccccgaattttgggatttttgcaattcaaccttgtattgtcaaatgaaaccggactggcttgagcttatcccggacatatttgatcagtacccaattgaatacctaatgatgtaagttgtctactcgtcggtcttttactaatggtacattgggaaaatataaaacattagtcttagtcgtcaaaaaggaaagccatagactctgcattttacattttcttgtacgcgaaatcaacctctcggtctcttttcaacaccccaaccagagagaagagatcgtttaaattaatctcactgtgaatctcacgcttatatagtgagaagcatagattcactgggggaacaggaggaaagaacaaaattgagcttgtgacccagagtcgtggtatgttggaaaatacgttcacctgtagagagaacatattttataagggccctgaggcactagtgcgcttgctttcggatccagtccgtcagacgttgtaccttgataaatggacttgactgacttacctcattctaccgctttaagatgcccttttcaaatgccaatttctgaacatctcgcaaccagtctccacaacgataaagtggtgtaccaggatacaattgtttgcccccaagcgtcaactgggctcgaggcgcctcgactgctctgcaacactccgtctcgaatctgggcaaatctgtgtgtgcaatggatccaatgattttcttcgtgcctggaacataagacgccgagagctcagggtcaaaggaacctcttgggtcgtatctcataccctggagtaaattcccagtgacatgatagagacgtcctctttcagacatttggggggcggtggggttgatttcaatgtaaatggcttcatggttaggtgcaccaagatattcggccgtgtaaacactgaaagacatatttaaagagttttgaaatgttgtggtaactgaaaaagctattgaggtctgatgagtgggctgttacgctcgtacaagtctctttatatgttgagcagaaacatcaaggacttcatcatggctcagaccattctcgtcaatatgccaagttggtgttgcatgtgtctacgtgcatagaaggtaccgcgcgccaaaatgcacgtttgacgctgattggtgtacaaatgaaatttttgtgcgcaggttgcatttcacggcgagacgcccattacgaaactgctgctaattctcctttatttttattttctattttcgtacaagtcgattagtttcttggctcttgccaactaagtaattgaaggtggttggcgccttcactagatcacggcccgaaaagagcgctaatttcccttgctcattgagtgcctctattaagaaaatcatccggcttgaagtaacaatatttggattttaggcagtgcaggtgttaggtgaaaccgtagagtgaatggaatagactgctctccagtacacattcactgacctaggtgattagtcattcgctatccttaatggatgtgtgtttgatactgatgacgataaagggtgtttgtttgtttcagcacgaggttacatctgcctttcgcgcgcgttacatagaaagaaaacattgaaattcagcaaatttttgatggaaatacaatttaacagaagattggatttcaactttaaaaagccaatcaattttcagcattcattagaaacccaaaacgaagctcccgccaaccatcttcgctataaggatcacagtataaaaacttcttgtcaggctgcgtggccacttttgtaacaggattaaatgaggaggatccttggacagtaaatgcaaaaatattattagagattccaagtatcggtccattgcggagcactgtggtggggtcaaataattgttcacgtgctctattctgttgtgcccaaccccgcctcgtcgctcgtagaaggacaaggatcaactcgattatctcaaccgaaaacaagcagtgaagcagaactttatctgctccctcaatagctcaatagcgttgctagtagctgttcaatgaatggacctatggcctaccttcgaccggctctgaaaaaacctgagcaggacccttgcgaaaaattaagaaactggcttccaaaggcagaattttcagcgaaagatgatacgccatacatgaggttatatcgaaacattccggcagatcttctccagcctttccaaaaggaggtatggaatttcgttattgattttcattcatatcccatacagctgaccttaggctagaatataaaaaccagcttaatacaattcgcgaacggagtatccccgtgggaaccctacagcactctaacagtgatccttttatacgaagacaatgtaaatgtatctcttatcaatcacaacgcaaatatcctactagcgaccggtgacttaatagaatggagtaggttaatagaaatcttgaattcgtatatctatatggtgacctagagcaaagagactatatgatagtctcctctaagagataggttattgtttaggtaagggaatacctattatttaggagaaggatggtatataatagtcaaatgaagtagatagaagcgctgccgtttcttaaggagctgagaagccggaatgcagtaaaataggtatcttagatatagtattaaaagatagaagagaataagaaaatatttctatatctacaaaatccggaggatatattaaatatagatcgcgtgagtctatatattctattagctatcgagatattaactagttaacaatcaataaactatatgagttatcttagtgaatttaggggagcgaatatactgtctaatatccgtggactatatattacagatctagactaataagttgaagtcgatggttatatatcacttactataggaaacccttagggcttagattcctgcttagggaagctctctcctagtctataggagtcagtattatgttaatagatcttattacccggaaggcttacctaatagatttagaataaaataattaggatcttctatagaggttgtctgtagttatactatattaatcgatagaattagattaggagataggctgtctagatttaaattggtcctactgttaatataatatcttttccgcgctttatatagtaagtcacttataggctacgagtcccttttggtttaggattctaccctaaaatcagcttatctatctagggaaaattgatatataggaaagaagagcctttgtctttccagtttatctatagtatctgaaccaaatggatctaggtactattttataaacgattctagagtaatatcaaaattgcagtatagagcattatatatatcggaaaatctagaggctaattgtaagtaaaaagtaataagcgaaacagtttatagatatactagacacttttactaaatatatatttaataatatatagaacagagagatagtttaaatgtaaactcgctaggcttttcttatattaatctttttttaggtagtctgtaaatatagatatcgattgggttactttcgcctagtaccttaataaagtaaaggttggggtaactagatctatatatcagctctatataaacctgattagcaagaagcctaacagtaaaataagatatcactacttctaatatcctaaccgctctctgcttaaagccagttaattacctcagccccctaagccacactataccgaagttcctaaagatagttagctctgctttttgaaatatatcctattatctagtttaccgattttagatctacactaagacaatatataatatgataaagtatacctagtaagaaattctaataggatactatagatttcgcctacttcgcattgccggcgcatttttgtgtaagcgaagtataagccctaagagtttgaatgatatctgagtgccgagaatagatagttaatattagggaattactgtctcttaggcaattttcgttttagaataatgaatctagaatggaaatttaagggagagatatagtactagaccacttttctatataagggatcctattaataaaattttctaaaggtttcttctacgtttcttctgactaagatgaacccgatagcgaaacccctttacgcttggtcgctgaaagggattgagaaacgggaggccagagaagataagataaggtgatttcgcgtggaatttgagattgtacaaggatatacggtgggacgtaaggcgtctattctcttagtatctgccgaaggccataaatctgcctctccaaatcggcaatatagtcggaagtattgctgggttccatctcgcgctcaaggaaagatgaagtacgatgtagaatagatggttcagaccactgggagacagcggggaaagcgagttaacacgaaatctactaacaaagaatgattgggcgtgacaggggtatgggctcctaacccatacccctatcacgcccaatcaattgcggggcagcatctgcccaatatatgagctcacatgcacgtacgctcctcttttcgtgtgccaacttcttcttctggccactatagatacctgtgtcgacaaagccagcatatgtaaggccagagaggcgaaaatggacttaagatacgtggatggggtatgatactagtgcttttaaaggtccatgtatgttcgtgcttgcagtctggtgctaggctgccgctagtagcttacatatgagctttataattgatggcatataaaattcgagaagtattgatatctcttagtggcgagaatattatctgcttgagcctacctaaagtttggtgtatgcttttgagttgtatatctcccctctttacctccctgggcaactcgtatgattctactcatgcataggcggacccgctagacctgaaccaagaaacccagctgatgtttgaagccttctatctctactgacgctttgaacgcaaattattctatactatcagaagctggctgtccaaccgacctcatgtactgcctgtcttctgaatcgctctggtctcttcttccgaactggatacaatccctctggatatcagaaggagaacaaaatagagaatgcctggatcaaactgtccctactgttcccagcctgtatacgagaactgaaccagcggtatataagcttcaaaactcggaagttgtatataacgtcacaaagcctctactagtttgcatttcaaaccaaatagagagactgccacggacacgcactaaatcacttgaaaattatatttgtgggttttcctgtaaactgtaagccttttctattaccttctcacattttacttgctagcaacccgaccctaagccatctctatgaaatttgatgacaacacagactgtgagactattgtgcttcctggcatccctccaggcattgaatttgtcaaaggcaggattacttgcatgggagagaaacacccatcacctgaatggtcaactatgtgtttgaaaaacaacaaactggctgtgatcatgttgtcaaacattagtcaaggaccgagtcttcagtaagtactcttctttattcttaggcttgttgaagtaatctaattttcgatagccggacctctagtgaccgatcggccagtgtggaaatattcccggcactttcgcggtataatcatatggctaacttttgtggccagatttataagtcccgatataaatttcataaacagaaatatcacgatattctataaattactctctaaattggatgcctattcttcgaatttgagcggatgtggaatggaatggaaacctatagctttagcactggcgtttctgcaaattcttctacccttatgagggacttcactaaagtgattttcctaataaaatgaaatataacttggcagattattgactcttggatagtccctgatccctttccaacgacagtagttactgttattctagggtggggaaaggagtagcagctggccaatgacataagggcccagtataggaaaatgattggctcagcgttactctttaacctaaagcaacaatgccctagttactagctgaacactatatagaaaataatccaatcatcgtaaattaacattcctatcaatacttttggtttagatattacatattttggcaagattggtgccggtaggcgattagtgaggccatcaaataatggccttgcattttactctgttcctagcccctacgaagtacactattccgcaggggcttttgagctttacacagtatcccaggaagccacatacatcagcttgtggaattaaaacgatttctgcaatgtagcagcttgtcaaggctattatggaatgtcaaatatttctaggatgtgagtagagtaggtacccattcaagtatataaagacaaagacctctcccagaaatctccgaaagaaaagcaagcgttagatcaataaaaatggaattccctttttgtggtacgctcttcaaaccactatcgcatcattataaagctaacccaaggacccccagatcctgatatatccttacatatatttagacgaatagggccacacatctatgacgttccagatggtcagaaagagtatacctgctaggcgaggctatattagctaataacctacagactttatcataaaactcgatgcaacgaattgccctatgtacgagcctgtcgataacaaattatggatcctgtgcgccggaagcagcactactatatattttacacttgatcggatatacgaagtccttctggaatctgagacctgtaaccatatttgggatctattcgaaaaatcctttttattttcgatttcccggacgtcgaagatagaagaaatatgcttggctaagccaggtgtctatatagtccctagcggtaagaagcgtgttatgacttgttaagttagagatagaggctgatatgcgatagacttgatgataatgcgcacgaacagataggcctccagaggaggttattcttataaacttatttcgaaaaaattacatagcgattgtcaacgcctctttgcgcttggccgagacggacaagaacttatgctcgctgagatatacgcgggtctatcgattcttggtaaattctcgaggtctatactcctaggaatgattgccatcatgagggactggcttcgaaattaagagttttctattaccgatgagggggtgttgactaggcttgtcttacaattagggcggcctgttaaaacccagggcattgctaatcttgtgaaaacgtgggttgtctaaggcgaatatcgtatgactcaacttttacggaatggagactattgggatgccaagtgcgaaatgttgggttctcactattggtagcaaccgacgggaaccccataggaactcttgaatgctttatgttgaaggacgcccttttaccaccgctctattttctttgatacttcacattagtatatacaattgtatttctcgttaccttttccccccttacctatagaagaataggcggttcgtgaggggctctatcgggtctggtggaggccaatcgggtgatccctcacgaactagagcagctttctatcttctatccgttgattcatgtaacttatatgaattattgttactctacttggccatagagttgtgtctctcaagagagtctatcttagaaacctacgaatatcttatagattagacaatacgtcctagccatatatctatgtataaagctacactaggttgcctttctgtctaaatacgcttgtttttatcatggtcaagtaattgctgttatgctatgtgcctatccgcaccctttatacttacctctattgaatgcagtgcgagagctagctatgtaccctgtcacgagcattccttaagccctaaatagtattcagaaagccgtagctatatgcttgaatggtaagtcgatagtaacggcagtcctagctagtcctgctccgtaaaactatgtgggtattcacctaccgggacattgcggtcaccaaataggcgtggtagtgattaaaccacctttttataatttggcctaactcttaagcatcttatacaccctggtaaactggtggtgttgcaaagctcggtaagatggtttatgactgggcagcgctctattctcctgtggaccacaacatatatagtcatgctgaccattatcggaaggccatataatcctaaaacggtatagctcggaatacataccctatatagacattatatcgtttatggtgcccgaatcggcctgtcgaggccacccgttatatcagttggttaagctaatgaaccaaagtttgcgtaataggcccatttaattagagtaattctatattgatgcctatttcgtaccttttaccttgtacctcgcacctagcctttttggaatgggggtggactataaaggtgatagatagcccacccttttcttaatatacccgataatcctttagcatcgttgctcataagatctgtgactccggcctaagcttccttcagagtgcgtttaagcctgctctgttatctcgctgatcacttgttgcgagtctcacattaggcgcttagacttgtcattgtaagtaccttttttgatcattcccgtccatcagcttaccttgtataatacctagccgaaaccctatatcgcaaaatgagtaatgatcgaattcccgcacacttggataccctcggaagcacttaatatcaatttacaagcctagtagagtgtgatatcgatgaagcaattcggcatagtattgtagcgcttcagactgctattgattctgctctcttagagacccttgggatgcagctagatgctcggtaccagcgaacacaaaatcctaatgatctcaatgcatcagtacggtgttatcagcttgcgactaaaacgacttctgatttcgactatgcagcacgcctagattgtctagtaaaattgctcaatgctcgattctattgcctagcctaaaccctacgttgtaaaacgagtgaggatcagctttccctacgcttagacgccctcgaaagcagttctcaagctcacgatcagcctataaacctgacgggtgatgtcgatgaagcagtttggcttgactttctagcgctttaggccgctgttaatcctgcactcttacagaaccttgggatgcagctggatgctcgataccagtaaacacaaaatcctaatgaactcgatacagcagtacagtgttgttagcttgtgactaaaacgacttcttatgccgactatgtagcgcacttaaatcgtctagtgggagtattcgaatctcgattctaatacctagaccaaagccgacgtcgcgaaacgagcgatgatcagctttccctacgcttaggcgccctagaaagcagttcccatgcttagaatcagcccacaaacccgacgggtgatgttgatgaagcatttcggcttggctttctagctctttgggccgctgttgaccctgcgctcctcgagaaccttgggatgcaactgcatatacgataccatctaacagaagatatcgttgatctcaacttagcgatcgactattcttggcttgcgaccaagatgattacttacgaccatcccaactacaaaatgtgcctagatcttctggcgggactactcgatgctcgattccaatctacgggatttttgcctgaccttgattgagcgattcaacttacttgtactgcataaattggcaggataaatcaaaacgatttggtatggtactggttcgaactcggggaaaggcttggaagacggtttggctctagaggaactatcgttgatcttaacgatgctatttggtacctttccctagcggttaaagagatcactgaagattctgctttcctcgtcgatctcttagtcgagctcgcttttaattttaatcttcgatacgagatattggcaaagatagaagatctcgaatcggcgatttcgctatattaacgggctctttaagctaccgattatcaagatgaattacggttagattgcctgtgtaacctcggaagcgacctggaagcccgatatagacatatcggagagccctctgatctctacagagcgatcgccctagcttatattgcaatcagtataatggaggctatcagccctaactattatttgcttagggattgcttctatgagctcgggactaagctcggacttctatacgaaaaaataaatacgatagatgaccttaatgaggccattatatggtctcgtaaggcggtgggtgctattggggcacgtattgaggtttttcgccatatcgaacacttgttaacacttcgttataagagaacacactaaaccaaagattctgaagaagcagccaagtgggcagaagaagtagtcaagtgggaagaagcagtttagaaggatgggcctttgttgctagctagttttatgatccctatatggaggcgtgtttttatagatgaatataaataccacgtcggacgttaatttaagtagtaaaggtatatctctttgggctccgttggcgggtgactgcatgacgtctgaaacgctgctttatagattgaagcataccagtagatctgcgatatctcctaatctaaccccgggagtaaggtacgcattgacagggaagccccatactcatggaaacccgcactctgtagatggctatgtccgaactaggcaccattgatgaatataaaaaaggggtaagtttatatatttcggtatcctaggataccgaaatgagatcatatgtcccttggcacgcaagccaggccatacacgggtagtcaatatcggcgtcctagcagggcatcatattaaaacatatactttagcggctaataacctattattgaccaacaaagcaccaggacccttaagcatttacgtaggtaacgctacgccaaaatggctcagtagaagagggaactatagagtttgcgaatgggttagaaagttagtatacgatttgtagggttggccttccattcgtttaggttcgcgagagcttcctcagtgaccgcttcagtactaaaaggtcgccataccttaagcgcaatagattctgtggcgggggattccccctacttttagacatcttatagtaagaacttctcggaaaacttgcctataatcagcaaatggactatagccttattaagggcgggataagattttacggtaggagggttcctatatagggcgtatgcaatcatagtatccagtaggaagcgggaattgtttctatatacctattagttgagaggggatgatactatactaaaagaattctcacatttttttgcctacttctttactataccgaataagaaagctagggctaaagtagtatatacactactactactaatacttactgattttcttcttattatagaaagatttatacagttttcttttcttaactggtattaggcctcttgagttataaagtgtactgataacatttctttttagagtagtctctactgtaccctattgacatttacactcaatttctctaataaaaaaaagaaatagagaatatcgagcaatatgtagctttatattatatatattattcttattatataggtatattaaataggttataagactagtacaattgggcttttaagtagtatttaaggagcttaagttattctaggaagggccgctctagaaaccagagaccttctagatataggagtactgttctaaaaaggtagcgaggttatatgaatgaaggcgttcgccggtatgctagacttccgttagctattataaagttagttaggaatataccgattctagaatattaggttcatttggtttacaatctttaattactatacctggttgctccggctcctctagttactctagctcctctggttgctctagttcctctggttactctagctcctccggttactccggctcctctggttactctggctcctccggttacttaggctcctctaattacttaagggtaaggtagggcctaaggttcctagaggattagtctaattaagatttaatagtaagagaaagcttctacttagagcttgcctaaaaacccctaattaataagggtaagtaggatatatctaaaagcttcttaggctgcgtagataggctattattattaagtagagagatagatttagaaatacgaccttagggattcgaggttaagttaaccgaattcttatctttactcaaaaaccttatagaatcactaaaatcactaataactaagttaatatctaattccctaaagcttttattcgaaattaaataatcattagggttactaccccttatattactaggagtatagtcggcttattactatggttctaataagtattgtttaaataagtatcgtttacttgaggtaatatcgttagagctaattaaattaatagtagtaattttgtccttattgggaatatctttaactattagctagggtctcgataaagattatcggaagtatttaggtattatacctcttaatttaatttcctctagtattacttttattaacctctctaatcgcctaattattagacttattaggttgactaaacgaatatatatcttattctttatatattagatacctaaggtttttaaagatctaggctaagttaaggtatattagtggttattgtctaaatcgatagtagagttataagaagttatatctaagttatttaataagtttatatttaggctatctgggagatacttatcgaaattattaggaaaagattgattataggtatcgatagatatatctagaaaataaaggtaaattaagttaaatcctcgagatattgtatttctaggcttctttaccagataagttttagtcgttcagttagaccaccctatctaataatactataagatagccttaatttaggctactatctagggccgataaagaaaattgtctagagctattatactttaccttataattgattaaacagtctgtattagcttaaatctacttataaaggctaataaccgtttcgataggtaatatcgactaaagtttataagagatatagactatatctagaatctataatagggttaataagcgttaggtcctaagtagagttaggcctacctctttctctaaattttctctaggtaagaagttaaagctcccttattctctatagtgattagcctaaaggaagagtcagatagtataagttctgattaggtagctagcttatattaagagaaaacttgatctaaagtattttaagggtaaaagcttctaaagaggactaaggaattcgatagtaaataataaatagatttcgagagtaaaggaattcgatagtaagtaataaacggatttcgagagcacttagagatcgctaatatactttaggggaggaggggagtaacgctaactgtaaggataaagtaggtactactctttcttagcttacccttagcttaccctctgcttaccttctacttaccctctacttacctcctctgattgtaggatttattatattcgtaaagtcgaaatatataggatagaagggtttgtataatattttataagtggctaagggtataaaaggaactttacaataatctaacaaatttaacctctatagttaaagtaaataactatattctttagtcttattataagttattaaagaaaggaaaaacgatctttataaattaattatataggattagttaaagctgttattatataactagtattatagactaataataaatattaatttatagtataattatagggcgattaaagcgcttagtaagcgcttagtaagtgcttaggaagtaaggcagaaattattcctcccggtagaaaatataaatataccctaggacctggttattagaccttatataagttatatagtactatctggtaggcttagtaggtcttatcatattatttcctaaaatagttatatatattaataaatgtactattaaggcttacttaatatattatgatttaggaccacttaataagcgacctttaactactattataactaggaactactaggtttctactccctactcgttatatataggtaactgttgagcgagataagagcttttatttgctttccctacgctacctcttattatattaaagtaaggaaatagataccctttaagaaatattattatagaaattaggtagattagttgatcctagatatatattaactattatatacgataaacttaataagtattaagtaactaggaagttaacagttcttaagggcagtgttagttcttacagtcctttccctttatatgtatatcgaatatgaagggagttactagctaagtgttttacttattcgaggaaatcatattacttaattatatatatatatataatttattaacgcccagcggctgagccgagagggcaactatcactaaactactagtacatgtatgtgcttaattatagtgtgtgtgtgtgtgtgtgtgtgtgtgtgtaattcatttacactgatccctcgtcgaaataatatatagcctaccgctactatatatatcttcctatatatatatattatataccacttcctaagcgaacttagagcctcgccgaggcctgctgtggcctctatgctatcgttgtgtttatactgcccttatagtgcgcggctttgaaaccgttataatacttcagcaaaatctaagacagcctctactatcttggtttgtgatatactgttaatcttacctcttccttcttctcctagtctatctaatagtatcgatatactattaaaagtatcgctaaccttaatttatagctctttcctcagttctcttaattataggtaatctaataatacgtagtaaacgctttcccgtttactacagatatatatatcgttatctcgaaattagaaagtctttatatatattaataaccagtagtgtctagtttataactgtatgaataagtacgcttaatttctaggtagggagccgtagagctatttagtatacttggctggtagtatattatcgatctaatatagatatataccggtgcttaagccgttctattcgttcttctattaggtatagatcccttgcctaatatatactctcttacgtaatagcaaatagtaaaacgggtgagttttacccggtacagctgtctctttagctagtaaatcggtagcgttattccctagtacttcgcagtatctgggtatctactgtagttatatcgatatactataggtcttagtattcttagctacttgtagaatggtatagataatctattatcctaacttattcctaggattctagattacttatagggctaacttgctattactaaggatagtagtagatcctacctataagtaggatattctctagtattagagagcgaccttattaataatattaatagtatataggaccctaattagcttagcggtatatactaactaccgatctataggtctaacctatacttatatactatcgattatttctagtaagttatttagtatagctactgcagtacctagatagccttctcttcctaaggtatccgagtacactataatgtccgcggttaactataccgccttagccctttctattataatctccctatctaatttaatcttaatttctaagaaggcttcttttcgctaaggtagtagtagggttagattaatcatttcgatttcctatagtctctctaagtttatggtttttaaggcttctgatagtaggaactaggcaaataatctataattgttatatcttctctaggtttaattcagggcgttctatataggatgtttttagggtagggtatatagtctagtgatagtattctatatacagtagtgtagacaaaggtgcgttagtagtatatatacctctatattaagtatagttattactactattcgaaatatagatagaacgtagataagcgccgctcattatatagtacagaggtattatagataggtcttatcttaaagcggattatactagacagtcgatatatagtcgataactagtataacgtacactttataaagctattatatttactctagacagagttattataagcccctaagcgcgatattaaccttagtagcttgtttaacggcttattgtatatattccttctactgtaacttatagtcgaagattatacctaggaatttagtagttatagatagtttaatagtattactatttataataagctggccctagctctattctttcctcttacgagtaatataaataagttcggttttctctatagtaaagtaagacctagtttactaggcctaggcttcgatctagggtatatctttagactagattttagctaggttctcttcagcgctctagctaactcgctaatagaagtagttatcgataaaggcagataccctactataaaaatcgactagctagtcgactaggtcgcagttaaagaatataaagaggataggtaagagtagagagccttatataagcctagctttatctagcgatactaccttagtctagtagttattgaacctaatacttacctagcgcccacttataaagcttataatctacttctaggctactaataggatacccttagactagaggcggatatctaggcttatcttatttaccctattaaaggctccctttaggttaaaggctactagtaagataaccttctgtctatattatacccggtcgattgtattagtaagtattaggagggcttactcggttatttgtcctagacgtcctctaaactaagtatctagtagaagactgtagtactccgcgaagaaggatagccactgggctattactacttctaataacttactaagtatattaagtagcgagattaggtagtaagctctaggtagtaagtagtctactttcctaggcttctgtaagactatgattcgtatacttctctatcgctataaatagtatcctagttcaatcgataatgtaaaaatccttataataatatttctaagatatttctagagatatttctagattaatataggtagactatccttacctagtactattatacctttagtagccctaagagatcgatagattttaatcttagagattggatgctattggatcttagttagggtataggcaggtacttcctcttatatagacgctatagataggaaaaacgagtctataaatacctaagctttctctatattattaactagctctatatcgctaaccttaagggcaggaatatagccttaggaatcttatggttttatataaatcgctgccttctataatttcccttctcctactttatctaggaactgtttctaataggatatcttagccttcttaatagtctgagtctatacctactgtgcctagtatatatcttcgaatatagctatagtgtgggtattagcttatctaatcttagcgcagctctcttactacttatattgtaggcagtttatatctttctattaggctttaaggttggtagtaaactactgtttagagtatagggaaggtcttatatcgggtatatacttattgactatattcgctattatacttataagtctctctataactgtatctagcgcctcggctaagtctagctccctaggttactcgaaaagttcctagatctcctttctaatcttctcctagtctacttagtcgtatacctttcttattttactagtagggttatattatacttagaggtactattctgaataagtaccttagtaatctaaattatagttattgtaatagagatagtatttaaagagtaggtctaatctatttattactatctagttaattatagaacttctccctaggtagcttaacgactagaaggttgtagttccctaagggaggtagctctaaaggctataattataaaagaaattgattagttccctagtatccttaataaattgaggttaaatatggttacttccctatactaggtagtagcgattaaaatctccggctaaaataaggctaaaggttctactattatcttatataatattttaaatagtattgtagattaccgataaggtcacctctgccgatactctattaggtatatatatcggtataggcagaatatagactaagaagattaggatttaggagtcggctatctagactttaatcgctattagatctgggtaattgtatcttacttattagtaagaggaggttaagagtttgcaattaatatagataaggctttagtatcgaactgaatcgctttctactataggttaatagagtcgctatacgctatagtttatatatattcggtaggcagtgattgacagttcttagataaggagtatatctagtttctagctctaatagttattaataagagcttctatacctaccctcgattttatagtatttagttatagaattctaaggttattatctaatattataataggggtaccgtggctagtatcgggtatagtaagtctctagtcggatattccccgctatattccaagtagtgcactctaatacctaggggatatctttctcgcttatattagccgctatagtggctatattagggtatctctttatataaccatactagatagctgaatccttggtatcggaagtatcgtttctttttaatcttatacttttccactcttctaatatactgttaatcaattaataggctattatctagtatctattctactacctctagtaagtcgaattagatacctattaaggcaaatgttcctagttctttatctcttttctttagctaagctatatctttaatttgaaatctacggtcggtaagatcgttcttatttacaatctttttaatagctttggttttcctatttttgaggtctaacctaaaggttaggatatagtaaacggcgactccgaaatgtagctttactagtctaatatcgttacctagctcggttagctactcagtattagtatgggccgtttcggccgatacttggtttttaaatcggatcatatatctagttttggtagtactaatccctataacctatgcgtcctaagtagatagtgtcttcgacagtgccgtcctaatataggcgttcgtagctgggatagggaggtagtagccgaacgtgtctctgttattatctatacctaacgctttagtaatagatcgctaggtactgatttggatacagttcttatctttattagtttatcgctaggtctcctagggttgcggattatccgtactggctgtaacggccgcctataattgtattagggttagagtgttcctctcctttacctacgactatagcgctataatctcttcctatagcttcttattctgagtttagagctcgttctagttatctttcacttcttttagttcggtcccggtagcgcgaataagtgtggtttgctcctcaatggtgtattgcaggtatacgataatctgctaaatctctctagttatcacttgtccagtgctggttccggtattagtcagttccacgggttctggggccgcgtgggtctgctcgctttccactcgtgtatgtctcctggtccggaccgtggtcgttagtataaggttttctgttacgacgatccctgtgcctcttcgcgtggttgtggtggcaaggggctcgggagcccccgtgggtgggtccgccattcgtctggcgttagctcccgctcggcacacaacacaataatttatatcgcaatagtatcaaccacaacgtccgcgcaatagtcaaggtctctcccagctctcgaacgttacagtccgccaatttacagtggaattcgaaatcagttttaactctaaactcttacgatttaattcccggaccctaagtggagacacgctaatctaattttagctcttcccctgttaatccatgtagggctgtattgtattcactggtaaccacaatgagtcattgttatagtaccgtaatttcttgtagaaatcgatggaatccatcgtgcaaacagatcaaacaaaagagaatccgaacaatctggcaagatcttctttcattctctcatgtcttgcttgggccatttgtcacgcgcagccttcgcccacactcttttgcatcaaaaagaaggctctagtgactccatagagaacttatcctggtacgcaacttgtttctctatagctctggcctctgctatccactgcgattctcattcgttaccaagtcctaaggaaatccggtactcgggaagctgacatggaccctcccagaactgccatcgtactgtagagatgacacagagcccatatcatgacgatttcatcccccatcccgaagatcctgtaacatgggaaaacaactcacagtacgctccaatacctggatattgcggtagtcccaatgcaacacggttcaactacagtccctccccctctgttgtgctagaagatcagtcactatcagatattcttaggctgctctagttgtctgaatgggaagaaggaagagtatacgacaaggacccgccgacctatatacactaccgtatagagtggcgtgttacagtcaacaatcgagaggtgtcaatggacacggaggaagatcttgttttggcccctagtgccttttggcagctgttcttagagaagaaattagagaaagttcttcgacgaaaaattgcccgtcatcgtccagtgagagctgatgacactgcgattgtcgttttagtgactgaccgaacccaacgcaattcgactaaacgattttgatgctgataccatttgtacccccatcgagtagcagttttcggtgtggtcaggtttatttctccttgtgtaaattacccacactgaagattagtgttaattacgtagacgatcgtcactatcctccagccgttggtcgaatggagagaaaagagaaaaatcctctgtcgcagagaaaatgctcgaagagagagccgctcagcttaatgctgagtaggatgcttctggagaaagacttatataacgcagcgtctataacctgatgcggtgcgtatcctcgacttgcccattaggcccatattgttgttgggtggatccactgggaaaaaggcattaccaactaaagactcgtcatagcgagcggctcgttacccgcgtcgaaaaaggtggggtgttaggcggatacaaagatttgccagaaacagtatgcgaagaatcataaacggaagagcaacagagacaggaaaagaacaatcgcaaaggaggacatgtgactggaaatggagcaccgtatcctaccatcaacatcaatatcttaccctcgcagtcttccacctctgcggctgcataggtttctgctgacttccagtccatgcaatatccaggcccgcttgagatccctggacctagggatgaaatatccaaggaatatagcgaatgtcaagtgtcaaatgtcattgatgacactctcaaggctgcatttcaagatatctgtgacatgatgatcgacaatggtcctgaacttgagcaggtctacaaggatcaagaccaagaactctttattggaagaagcataaagatactatacttccagaaatcggtgtcactatctacactgtttcatcatttctccctgacgccaagatgcgcagggctatatttgagggactactggaatattgatattcaaatatgtatgaatactatttgctacgatcgtgtttttcacagcagcttcttgtaagaagtataaggaatctgtgcctacttctcaatacaactccggatactgcagttgctcatacattagaaacaggccacaaagtaatgatttgtatttagcactatttagtagaactcttaggctgtcggcggttatcgcgtacgtaaaccacagtaggtaaaccacttcgagagcaccgtcggctggtttcaaaaatagatgaagctgcgactaaatcactgagcttgtggtacccatatgtgcgagagtcaaagtcaggatatttgtttgtgaggagttgaccgacatcagaaagcttagcccatccatcgtcatcgcaggatgcttctaccgttgtccgcaactggtctgcgaagtgtttatcttcgggagcttgtttagttgctgatgaattctcaggtgcgatcacactatcagcatgaggtagaagctcatcaagatgtacgaggttttcagtgtagataaatttatcgcaagcagcaacgaaaggcttaggcgtcctctgctcgccgagtccgtacacgatgagtccggactcacgaatacgagcagctagccgggtaaagtcactatcgcttgagacaagacagaacccatcatatcggccagagtataaaagatccatcgcatcaatgatcatagctgagtcagtcgcattcttgccgtgggtatacgcgaactgctgtattggttgaatcgattgttcaaggagcttgtccttccaacccttcagagctgggctgctccagtctccataagctcttttagcatgagctgtaccatatttcgcaatttcggagagaaggtcactaataagagaagaccgcgcgttgtccgcatcaattaggactgcgagtttggtgtcaccaatcattacggtgaaagtgtatggaataagatagtgacttcacagctacaaaatagatactttatcttcctgttgccatcacgtggataaatttattagttttgttcttataaacaaaagtcatgacgacgtatatacgttattgattattaagagtgtaagggttccacagtttggggcaagtatagcgatgagtgtttcatgcgagataacatggatttaagtatcgctggtcgcggtgaaattgtaatacttgcataggggacacaccaaatggtgaccagcctatgcgcctgaactcaacccttttaccacatccggagtcatctacgtaaaccagctgatacgattgaaaatccgataaatcatgcagataccattctcgtaaattggcatttcgctccctcgcttactgccgagtgcactttgtagaccaacctttggcaacaagggctcgtctgatgctagaggttgtgactagggtgcggaattcatcctagagggaaacagccatctcatcgaggtatatatcaaccgggcttttcagataggtgttcgcagagggcttcgatcattatactgttccgtattctgtcctgcttctaatacgatgacataactagttatgtaccgtgctttgtctgaaagcatggacgtgacagggcagtgccacctgatcccacctttataataaagaccgagaaagccgtgtaatatggttactgtaactggtaattctgtagatagtcgtactaccactcctaagggagtctcgtttcaaggagcgattgacagggaagtcacgcactaagtaccgcttgaaaacatatcctggggagcagaaaggcgaggggttctggcttagcggaaggtacttaccgggtaatattcggccgatccgagactgagtattggactctatacttacgatagttgtgcctgcagacttgtaagcttagtgcagcttcgctttaacactataccttatttgtaagggccgaggtagttgagcgactgctgccacggcctaccgttgattctcagttaattaataatagtctcttaattagattaaatgaactggtctataagatatcaaggcctacctaattgtaagttcaacaaatgttagtggaaaaacagaggtggtgatactgtagcaattaaaattcaagtgtataaaataagggccgtccgttgaaagtggtaagaatattgtttagatactgtcccctctaaaaaagaaattgggttgattgaataggattggttaaacaatatcaccctctctacctagatataaggtctgtgcattttcctaatcccgcaaaacgacaactatgtcgagtggaggcaggagatgcaaaacgtcttcggttttcgtgataaggaaatctattttctacctgttaaattagcgattttatgactcaaattcccatggtcacctatatattccaaggcgaagtgcgctccttattcatgtgcatcaacaccacccaacttattatgtgagccggaccctcgaacttgaggctttttccgatgataacaccattatgaaagccatcgtaaaggttcatttaatttcaatacctagctaagactgtcgtgtactaaccgaaaatattgcgataagcgcccaaccgctcgactaccttgaggaacgagattatccacatgactttcccagttatgctgttagacatacattccatcagcaggcctctctctgccaaactcattcgaaaatttcttatttgattcggcggctaacttcaagtatttgtagttcacctggttgacgtcagcctcagcgagagcgtgtgcaattgcagcgacgtttttgatctagttcatgattggtcagtaatgagatatatagtgccactcgaacacctacctctcgtccattcagatctaaagactccaatcgtcggagttcgtggtcctcaacaatggcagggccttgcatcgtacatgccttggacagaaaagttgaccagagttctctgcgaaactctcttgttaaattctcatactcaatgatcaaatggatccggctgagaattgcgtcatcaaactggataccccgatttgaagtcaagaaaagaattccttgataatattccagcttccggaggaaaatggtcacaaggcgattgtgggtatcgtggtaagatgtacgctgctccatgaacgcgtctgcttcgtccaagagaagcacggcattaaagtgtttggcgatcttgaatactgtttcaagctattgctcaagcgcattggaatccccgtggttgacaacaagttcgcctacagatatctggaaaaatcagtgacgccaaaatcagccgagctggatggttcataccgaatagagggggagcttgaaatactccgaggtcgcctcaaccgtgaaagtctttccgactcccggtgggccactagcacaagttaggtggggaagacttaatagcatagacgctttgccgacatacttcagaagaatgttgaacccttggccctttccatcaattacgtcgtcgaacggtaccgtcgggatcatccctaggcgggttttcgccaatgacaagaggatggtcttggtctctgaagggatcttcaggcagtcgaacgactcaggtgaccagtccacgtctctaagagcactgactgcgcactccactggaatcacattagccagacaccaaaacattgtcagccatgtcacatacagaacattttgtccttaaaactgaaacagcatagtattgggcaggagaccagtaaatccgcctcgctcagcttttgtgcatccacaccgtctcctcgcattttctccttctctcgctcacggtcctccataagcattgcaccaatgtcaatgactgaaattccatccttatctttgaccccaatgtcgcggagtgacggtcgggagtaatttggctgcatttcatggaaaaatgcggcgtctactcccactcgactgttgatattgaccttgaaagccttgcccttgttcataaagaatgcgctgccttcgcagtgtcgaacatgtgagccggccaaattccggaacttttgacccctctcgaccaaatctttccggacttgctcgtgacttggatggtggcagagagggaaggcctcaaggctctcgatcggctttgatcctcagaacttggccactcgcagaaagataccggcctcgccgaacttgaatccattataatcaagaaatcggcactcgagattcaaccacgtctcgtcattttgtgtcatctcttcgcccgcgtcgaatacggcacatcgtggctcttttgtgccaatgcatgtggtataaacatggcaaccaggcttgaaaagcgcccaaagaaggtcatatgtaatatgaccgtgctacaacattgattcgagacgctgcaaagtagaagcgtatgcgtgcttgaggtagttgataagcaagaggagatgctccgcatatgccgactcatggtctgaactgctatccatgttttccgcacatctgtcgagctctgggaggaaatgaaaaaggaaattttgctcgatctaaatccacgtcagcgtgcttcttgatgataatactgtcttatttaccgatggcttgatctccatcaggctaacggccttaatgtcgtgcagcacgtctcgcaggctatcgcgtaggccttccgacttgatgtctatgaatgacactatctccttagaagtccggtctgatcatactattagtaggttttcggtccagtatgcaaaggtcttacgtaccaacacgttcacggacaacgaatgcatactcagcgtagtcgtccaggtcattgctagtctccgttggctcgacaatcttgtatttacatgcttctttgtcccagctagacccgtgtcagctatctgaaaagtggaaggggtggttggctggtggctcatacgtttccataactgttttgaattgggattttgatgcccatttctcaaacgacttgaaatcatccggtgtggtacaaatcggactttcgagatcaatctcgtctaccgcctgagcattcccttccctctcattgctggcagaagaagaccgagcaggcttagttgccaaggagagttcagctgacgcatattcatcgtgggtgagcttgaccatcaaccgcttcagtcgacctatgtcaaggcctggtggggattggtcctgggagacaggagtgtttggaggttcttggtccgcaagatcgagcagcgcgctctcaagaaacacaccaaagagaagcatcaggtctttcaaggtggcaggaggcatagtcgactccttcgttgggctacctggtggcgtcaagccttggggacagggagaggaagatgcctttgcagtcttctgtgccaatgccatgtttgtgcggttggacgactgagaaatattggtgcagtatggggagctggtatgagtagaccaaatattggaatgccaatgatgaatggaaaggtcaacagaagcctgagaaattgctccttcttatatgttcgtccctagtcgtccatgccggtgtcttgtctttcttgtatacagatcggcgcaacagactaagtgaacttgcatgcatgtccaggggagttgattgtgcttgcggcaagctaatccaactgatttgacgtcgtcagctagagccaatgacggtcaaccccgtctatatgcacatcacagggaaagattgatgtgattcgtcctcgtctgctagctcaggtgtggtcaggtctgtccacttcaatatcactgaggggtgagaagcatattgttgggcaatatcactccactacggcagtgaaagcatgaaatgatggactgcgaaacaaagtgaaacataaacgggactaaataacacaaaatgagccatcttgtcatctgaagcaccaaaatgagactctatgagacagtgatgacatgacgtaaagaagacaaaagttggtgcaaatagtgtctactaattgttagtggggacaaaatgggacaaaatgggacaaaatgggattaagcaaaatgttcctcgtcaaattattgcggtgtacggcatcacctagtttttcattatcggcattgtctgcggtatttgactacgtcatatagaaggaggtaggtgggaaaagaagtttgaaataaaaattatatgtctttcttgaccttattgcaaatatgaaggactggtgaggatgacatgcttcttgcatccattctcgggtgacgcgaaatcacatgacttgtatttgctacccaaagggagttgggagagccctgcggtgggctcctctttattttgtagtctgtttcatcacagatccttgagtgcaccggtcttcaacaaattctactcagaaggcaatatttaaaggcaagtataccatgccactgctggttctcgagttgatcactctgaaactcgctgacgcgctcgccgagaattaggtgacacgctccaatcaacctttcccacaccctaaaccaccaacgacgaccagccgaacgtcgggattatcatgaacaaaatcaatgaatctgtatttcaaaagccaagggcacaagatgataaaggcctggaagaggaagcgaaatccttgttggttagaatcctggacgttttgcgtttttcaactgcttacctttatctttgtagaatgggaagtccgtggtccttgaaacagagtatttcaacgggaaatttctagattcaagtatcgcccctgcggtcctgatacacggagacgagggagagggcgtcatccactcgcgcgttgccgagggcagcattgatatactttcaacaggccccaaaacagggagtggccagagaattcttgttctgagcgatggacgtactggcctcatgttcagaaacgtattactacgacgtttcctttctggaaacgcctgatgtctggagcatccaaagatactgaatgaaggaataactgaattccctcgatacctcgatgttaacgtttaacccgggaggcagttgaagatcgacatggatatatggaggtgtcaaattgagaagagagtatgagagctgcaggttaggcccgctaattcgaagcagctcactgacagcttgtagatgagggaaatcggcgtggtacgcatggatgaagcccatgagctgtgaagagaggaaaaatattggctcttcgtcggtcatatttactgtaaaagttccgatggaacctttgccatattagcatgttcatgaaatcatagtcatatataaacaaacctgatccctcagaaactggtagctgcgcgctgaggccgctctcagtcctatcattatctgcaatccatccgtcagcacaattccaataaagcgaagaatggagggacactaccaaattctgagagggcattttgaaattcggtggactggtcaatttggctcctttgcggtgttggctctgcaggagagacggcgtattccaccctcttctgtttgacaccccgagacttcctaaaagttctgctttttgttctctcttttgaaaaaaaaaattagtacaatgcattcagcaagtggaagaaatgctatacgttgtacatggacaagacctcctctctctctttcgtggtccagctcgtgaatgagctcaatcgttcgtgattcgaacttttgggagggtgcattgtcctgccaccaatttgcaagacgaggaaatatttccctatggtccaatgatgccagatcagtgatggatattgtgacagtaacaaggacaaacagcggcttcgctatcgagtagatgttcttgaggtgttgtcgcgccttgtcatgtctgttctgggactgccgcgataccgagagtttgattatgttatgcaaaagacaataagacgattctagtcctctctggctgttcgcatctaggaatgggctactgtcaaggatgcctttttggtggagaagagagtcgaagaaatgctcagtcaatgacatggtgtcgccagctagtgaagcacttcaggttgaagaaacaagtcaaaatacagaagcaatgggacaaattgggcgagaacctcctcctaatgtcttatcctgagctttgacctcccactaaccctcctagtctaatactggatgtgacgtggttgcagcttgctgcataagcggcacaaatttatggtcagtcgcccggtcattgcaccaaccatagcctagggaaagacagggaagcgattcctgtgagtcgctttcacctcacacgccctgccttatttctaaatatagtatatcttctgccgcctactttgccttttagcgtccattactgcccattactgctcattactacttactactgaccattattgcgtgctattgacttgcacagcctacgtcgatacataatgttcccccatttctgtacactgctgctcaccactaactaaaattgcctacctgtgtgcaattctgcacgcgactgaccattctctcctaccactgtccactgttggccgcttctctactctcaaccctcattgctcaatatattcccggatgtgcctctcgtccaatagccagccttcttaccacagacgttcctgtctacagatagtgcgtagcaatgctcatcaactcttgaaagtgcagtcctaacggtctcacatcatgcgaggctcatgattataaaagggactcttcttccttaaaatttctgatctgatacacagcaagcttctgacacagatcaaacctcttctccttacctgataaacacaaagcttctaacacggacaaggcctctgccgtaaggtatttgttctcccaggtcttttagaaagagaataaccaaccagaacagatcacgtcaacatgtgcaagagaaactacaacatagcgatgcgtgcttgccgtcataaggttgagacgcccggcagtctgattcccgatgatggatgtaacaattgtggggtagagacaggcagaaacgataacattgccagttctacctcgcattttccttgcgatgactgcaaggctaatggcctttgggcccagacagccgatggaaaatggtacgaggttgcaacaggtgggcctcagaaatttacagctgatttcaggtttccctgtcagttctcctcgtagtactcattttcacgtaatctgacgaccccttctagaattccttggcaactttaactgttcgtggatattgcacggcgaagttcgacaatttattacctgtgaaggactgatgagctaccccatcctaagtcggataatacggcagtcattctttctgcttattcttgtgctgttgtcgagtttgttgttgttttggaaggtctgccagatctatttattagtggaccaaagggcggtccgaagagcaacccgcacgaatttttgatttaggtattaactcgtatttatgatccgtaattatcatcttttttttttctgttgtgcacttttactatagagaattgattctcccctatagaggaacggccctagttaatgagagaagggctcattctgacgaatatggcatggcgagggagtatttagtcgagcctttatttgtaagacaatatcccaaggtttctccctttttcccttctctccactcttgctgtccttccctcacaacacctgtaccaaactattttgccaccacccaaacagttattacttctgtacatttttgccaaaactctgcacggctaatactacgactacatgtgttttgattcgccatgggcttccactacgcggatgctctcgaggaacatagctgggttggcggaggactcgacgcttatatctaccacgtcactccaactattgtggtgaaaactgttcgtcgcgaccgaacccctgaagaaaaggcagcggggcatcccttcctcaaggagatcgcgttttacaaacgtcttaatgagtgccaggatcgatgtccgaatattattgaatgttttctcatgctcccggactatctttttctatcatattgcacgcataaggcaatcgcccctcgcttctatgaacgccaggagcgagagacaggaacaaatggttttcatgggcgtcttattagagtcaaggaatacgaggatcctgctctcatcgctcggtggatacaacaactcacctctgctcttgagtatgtagagaaaatgggcttttgtcacaatgatctgcatgcaagcaactgtcttcttgacaggaacttcaacttaaagctcgctgattttggtcgtgccaccaccattggacagccgcttgaaggtaccttgcctccacgggccaaaccaatacttgctggaccattgaaaggcacatacggtctctgttccgccagaactgaacagtttgccgtcgggacacttctatacttcatggtatatggtcatgaaccctatgacgacgttatcctcagcgccgcggaatgggatcgccgatttggggaaatggactttccagaacttaaccgcaacgaagtttttgatggtctcatttctgcttgttggcacaatgtctatcctacaatggccttgctagcatacgacttcaaacgcaagacaaaggatatgatctggaatgcagaatacgtcttcattgactctgatgaggagacaaagacctgtgaagcattggttcgcagaggcttgctgggacctgagttagctctccgctttcagccggcctggcgaagatacctacatgctattgtgaagagaagcatgtctatttggcaatgctttctacagagaaggttctggacctggtcttggtgaacggttggggcttgtaccatttgacttgctgaggtgcttggacttatagtcttaacccgaaacaaggacatgttatcgtacggtggctgtttcattcaacttcgcgattttcaaacaagaggcggtcttatcttattctatttcgttcggcacctatcagctgggtaacagccccatagctggtcccgtccactgatcttgctggactgcctggtacacagtgaatcaaaataatgaatacatgagatcgtaagctttttcatgcttcttcaagtcgccttgtctccacaacgctagatatctagtttcccctatcctcaggccaacaagtagtcgtggcagtggctgcttaaatttgccaaggttctgttctgctgtaacgtctggcgcagggaacgtaacatccatcccacgcgcagagatcaaagcgccaaacctttttgtggaagcagaacaccctgtgctgtactcagaatgggtcagtggcaagccgctagcgatctggaattttcaaatccctctcgtccacgggacttgtcctgttccttgtgccgcttcgctggcctggccatgtccactcgtgtgcgcccatcggtctgcgtggaagattttagtagagcctgcttaagagcgtaggcgacagaaggccacacatcatatgaactggctcttcgtactacttctcttctagtccaatcattctaggtccagaccagtcttgagatagtctaaaggcgacaggacggcgatcaagtcagactgccaccctttcattggcttatcagcttgctgtgggagcgggtctctgcagcggctttcattggacgtagaaagcccgtggaaagacagtgtggttggttctcctttctccaccttagagtagctacatccaagggcattgccttcgtacttcactatttcgctggaataactggaaactatgttgtatgactgggctattcaaactatacgcaatagcttttggcgagaaagccaaattccataggctcgaacttaccgatggccgcggatctggggagtagactaccgcagcacggaggctcatctggttggaatacttgcgtggaactgtggacttggaccaccaacactcaactacattgttgaattcagtcctcggtttatttacgttgtagtttgtggtgcaagagagattggtgcaagagaaaaacgagggaatggtcaaagtgttgattaggatggtatttcctacgtggcaacctccaaagatcgccgctgtttcttgagcgtcgtgctccagtatacctgtatggaccctttactcctcccggcgaatttctgtgcaaactgtctcgtcacctccgaccaagcaagattctgtccttccctgagcttcaccaataaagatacttcttcctcggaccatagtaaaccttttctcatacaaggggtatgttgagcatcaactagttcggtatttcggcttggctggtcacagtcgtatgtgatgtctgaatcttggtttgcgatgcatcttggtacagtggcatctgtgctcaaaggtgtagaaatacaatgcgataaagcaccctcaaacaaccaggacaggaactctagccggtcttcgacgggaagggccgagaattgagcacgaacggtaggaaacgaaacgctgctgcgacgatggggccctttattggaccgggcggcaccatgttttgaatatctcttctcagcgctcgaacgtttatttattttggactggcgaccaggaaccgccgttccctttgcattttgtcgtctggattgaacaggtgggtcttgattcggagagtgggagcactccaagaggcatctgtctggacatattgcgatgttggtggtattttccgttgtttgggtctgctcaccacctggaaaggcatgatcgtcgaggattgcgggatcgatagcttcattgcctggaaggtgttgaccagcaagaacggcagggtctgagtcgcacgatccaaaaccggaagatcgatgctccgcacccagacaaacattatcgggtattgtggtggaatcgatatcttcggtgctccgtaggtcttgcatttgcaaaaggtcttcagagtcgaaagtctcagcgtgaggactagtgaaggtggtacggcccaaatcctcaggctcgtgtcgagtggtctgagcgtccgaatgtaggccgtcatccaagcaaacctccaacggcgggcgggcaggaaggggatgccggccaggtttgtgagaatgacttttttgattcttagagacggggtcgataggattggagggaggcggggtgggagtcatcgagacaggacttgggtagcggcaaatatcgagagaatctcgcagaggctgggctttgtcctggaaaggattccatggccgaaaggattccaggcgaaaactagcgtttgacatattgtgtggaacagacggctgagacagtcttcgagatgtggtggttgtgggtagtcataaaacagggagactggcagagaacagagaactagggatgggggataggggataggggacaggggatgggggacagggtgcaggggagaggagaatttgaaggggttttgaattacagttttgccatttgggtggaattgtagtctctttatagacggcggtcgccagtgaggcggaatctgccttctctccagcgtagaagatcccgaccgactcctggaatccaggccactgcatccaagacgcgggaccacaccagtttcacaaccacgggttgtagctcaccggcaaaaatcaccactactcttccttgcggacgacctttgcgatgcatgccccacactagtcgtcagcttgttctccattcggtagtacaggtgtgatcgtggtacggtttccgcagtcgcggtccggcattggccgcatgatgcatcgtcgaccgaggtcaggcgcgtgcgaggcatttttgctattggcccatatcgccgcactgtgctttcgaaattcatcgattgggtgcggagagaccggagagaccgacgatgacgacaactgggcgccacgggattcgcgacgaggcaacggagagtcgttctgcgacatcaggggctgtgcaatgtaacctccgatggggcggatggagcggggcatatggcatcgaagatagtatgccagaactttgcagatgcgatggaggtcggtgaaatgagtgacgctcaacaagcaaggcgctctagcagagaaggcgacctagatagcttcgtaacacggtgtactgtcactcctctaggaaaagagtaggagggagtatcgacacgaaaccgaacgatgcggctgcgggctggatcatcccagggattctgctcctgggcgactggatggcatggcagtccaggacggccagaacgagctgggcgtcggatggagcggcatttccggtaaaatgaaaggggcagtgcgtcgagctgaaagccaatgcgcaagcgacggtgggggcgagaaagaaagggagcagagaagggaaaagagggaaagagaagggaaagtgcgtcgacaagtcgaggggagagggccagcgggtgttatatagatgaatggcagatggccggggcggtaaaagcggccagggacggggctaaacccaaacggggggagggtgagggcgctaaacctgaaggggcagggagatggtggagacgggcaggcggtcggggacggcagaggggcggtgcaatgggagctgtttccagcccaccgctcaccgtgtcaactaatctcgtatagtagtaattaactattagaagcaccaactagtatctaaagttgatttaaatagaaattggacgtggtctaaatctgggagtaggcgatggtcggaaatgcagaagtttagtttggtccaaaatgcagaagttcgggatggtcgaaaatgcagaagttcagtttagatgacttcttctgcattttggaccaaaccgaacttctgcatttccgaccatccggttcttctgcattttcgactaaacggaacttctacagaacttttacatttccgactgtcggattataatccatttttaactatactaaattactatattttagactatattctcccttaacaagtagaagcactaactagtatctacagtattttaaaatagatatatggcgtggtcaaatttctgggagtaggcaatggtcggaaatgcagaagtttggtttggtccaaaatgcagaagttcagtttagacgacttcttctgcattttggaccaacccgaacttctgcattttcgactatcggattataatccattttaactatacccaactactatatttcagactatattctcccttaataagcagaaattatacttatatagtagtaattaactattagaagtaccaattggtatcttttttatcttaaaacagatatatggcgtggtcaaatttgtgggagtaggcgatggtcggaaatgcagaagttcggtttggtccaaaatgcagaagttcagttcagatgataacttctgcattttagaccaaagcttcccttttgggaattttcgaccaaacgctaacccgattcggaattttgaaccaaagctaccgatccagttgacaaacttcaaccccttccaaagaattaaataaaatagatagaattatacaggcatcacatataggtttatatatactatgagtttgtctaaaaaatataaaaatcataaaaatcatagaatagaggctttaatatgtgcctgtattcggctaatagactgctgagtgacagctcctgagtctctaggtgccgcgcccgatgctgctgacctgtatactatatccctggactcttgcgttgccggttcaaagtcaatcactccattccaccattccatcaagatgcgggcgctgtaagattgctcctccgagagacgcggtagtaatttctcaaagttgtcgttatccagcagtagcagccagttctccagtgcccgcttccagccacggtaactgtctgcttcttctgccgttctccgtccagtgccaaaggaccattcgaccatggccccaatggagaacttggagatatcaaccctgtcctcctcttcctcttccagctcctgctgattgagcacactctgaggactacttagtccgcctagcgtcagatctttcaagccccgcgtagagaaaaaggcaccaatcaacatatcttgggccattttctgggcgaccaaaggagaagaacccatctcactgtcgcaggcctcgctatccgtcacaaaagccaacccccttagagcagccacgaggagtgaataactggcattgctctctgtttcctttctagccgacgtactagcctcatagtcaaacgccgtctccctaaattgatccgagcccaacccacagattccgcggatgcagtgggcggcgagtagttgcgggtgagggccaagagcttcttgtccattgccgagataagatggcagctggttttgcgggggtacacctgaagtttccaggagacggttgtagaggttatatagccctttgtagaagttttcgggcgcgacgaggttgtcgtcgatgtctgcaacgaatttgtacagatttctggccattttcgatcggcgctgagaacgaagagggtggattaccctcctctcgcgattgaaattgcttgcccgtgctgttgggagcctcgcccgaaggcaccaatgggttttccccacgtatcgtgtcacttggccatggcgctatgcatccctgtcaaagattgtattcgagggttaacttttgtaaagcattagatagatagatcccgtggattaggcaactcttaaaactaagacgatccagttcagctgtgggagaagcaactgagaaacagagggcaaaaaagccgagataaaggtaaaaatatatatagcccgaagggcttgttcagacacttggtatagttttatactaggataacgtatgtaaagttcttaagaatatccgggtagtctcctacattacatgaataaattgcttaataccgtgcaatttatattacaggggcgcagatgccctacaatctacatactgtattatcctatatgccttgacacctgaatgttctgcctggccggtcacgtgttaccctgcccttgggacatgcggcggacggaaatccgcgccaatgagcattgcgggactggaagctggaggaccactctcggcctgttttaagtcgcttcaataccggtagttcctgcaatgcttacatgctgggtggtctcgggtctactgttttggaagcggaatcaaggtgatcagaaatacgaaagatttcctggaatcacgtggcatgggttgcgtacacctgacgaggctgtgtgttgcctcatgcctgcatggcctcagccttgttgcaactgaacatttgttcttatcatccccccgactgcagagaaagggtcggggtgcccacgctacattatgaatgatggctcgacgcaggctcactcatcacgagtatacagttggatggatatgtgctttgccaatcgagttgaaagcagcgtgtgcggtactcgaccaagtccatgagacgctgccttcagccgaccgcgacgacaatgtgtacacgctggggcaggtggcccagcacaacatcgtcatcacatgccttccgaagggaatatatggaacaacccaagctgcgattgtcgcgcaaaggatggagctgagcttccctaatattcaataccgactgatggtcggggttggagggggagtcccttgtcctggcgatgtccggctgggcgatgtggtgattggcgtccctggcgctaattccacggggattgtcgcttacgaccacggaaaaacaactactgctggccatctagagcagacagtgattctcaacaaacccccgttgaacatgctcaaggcagttcctcacctcggacgccgtgttcggtccgtcagtcagactctgcaatcagcgatcgcgtcagatcccataccactggcagaatttgcatgtcctgggaaagagaatgacaaactattcgaggccgagtatgaccatccggattcgagtcgaagctgctcaagctgttgcgatgaggcgaaggttttgcggagacctcaaagagaaagtgtcgagccacatatccatacaggaacaattggatccggcaatcaggtcatcaaggatgctagaacgagagattctttggccaaagcgcatggaatattatgtttcgaaatggaagcggcggggcttgtggactcgtggccttgtttggtgtttcgaggcatctgcgactattcggactcccataagcagaaacagtggcagccatatgcggccataaccgcggcagcgtgtgcaagaagcctaatgttgctattgaacggaaagccacgtgaatgttaccaaaaccatgaagaagttgatgttccactggcctattcagacgctcgaaaggaatgcgttcagatcctatcattcagcaaccctattcgacatagggaagacctacaggaacggaaaggaagaagggccaagggaacctgcgagtggatgctgaaaaataacatctttcaagagtggcgtgagggttctggaaaaaacgattccaacattctgtggcttcacggcttgccagcaagtggcaagtccatgatgacaatcttccttaccgaagccctggagaacgatccaaatatgggagatgcaggcctggtgatttatttcttctgcgattccagctcccagaatcacacttcgggaatcgctgttctgagtggtttgatctggcaattgatcaaagatcgaccaataggtcaggaagtggttaggagatggtatgaagacgataaggtgctgtttacttctttcaaccgtctgtggaaattgttcattatgttgttgaatggtgggagcgaggggaaggtttattgtgtcattgacgcccttgatgagtgcgaccgagagtcacaaaacgcgatattgagaaagtttgagaactttttcgacccagagtactacgatcgatccctctcacatgtctatttcctcattacaagcagaccgtatgaggagatcagaacatacttggggggctttgtcaacgcggatatcggtgggttcgccgaggcaaaggatgatggtgctgcgttcgttgaaaactctgtggattacttgaccgagaagaagaggttttccactgagatgcaggggagagttcgtcacattattcaggaaaaagccgaagataccttcctctgggtctctttggctatggaggaagtgaaggatgctgctcgggcggatatcataggaatcctcgagcaattgcctactggactgagcagtctctatgggcaactgctcgaaagggcagcccaggctcgacccgagagcaaggaagacattcttcgtattgtcaatatcgtggcagtgtctctggaacctctcagtctcttgcaattagcctatgcctgccagttttatgcacaggaaagcgaggaagaacaggtacttgcaatgagaagctccatccacgattgcaagcttctggttgttgaaacaaacgataaagttgcattgctacataagtcagtcaaggactttcttacggacgaccggtataccagcggctctggcctttgggctgcccatgcgtttctagcgtataggtgtatcgatcgttgcatggagactgggcatcccaattgttgtttcgaaatttggcggccgcaaagatgagaaaattgacgatactagcctactcccctatgcaattcgtttctggccggagcacgcacatttcgcgggagagcagttcgagatcatcgagaaacaggtacattcttcaaagaggactctcttcagtggcaaaattggtggtcgcacctttctgcttcacaaacctacaaaagatgggcaaagccttctccatttcacattgctgcgatatggggaattctaccactcgttaagtacattctgcagaccacctcagtggacagataccacaggaccgaatatttggacaccgactttgtcacacaggagggcaagaccgctctagaactggcggcttcgtcggggcatgaaataattgtgtgccatctactagaaaatgcaccagcagagatggtaattttcaggggtgtcctagaagcagccatcaagaacacgcaacgaggggcgcaaatcatcgacgcgctccttttgcatccacgagcccgcacatcaaattggaaccatgcacacctcgtcaaagctgccaaaaaccctatatgtggtcgtgagattttacaaagtcttcttaagagggtccctaagctacggagttctttggatgacgacgtactagtagcagcggcaaggaacagcgacttggagcccatgagactgttgctcaccgttgatatggagaacacgaacttgagtgaaaaggtgttactgaaagcggttgggaacaaggcaaaggggcataacatgactcaccttctactcacgtctggaaccacaggttcaataacagagcctattataaacaaggcagcgagtaatacccgacagggactttccattctgagagttcttttgagacgatataatggaaggatttcagccaccacattgatccaggcagcgaaaattggacaagatcgtgctcatctactcctgcagcatgcctctggaatcgatataggcagcagcgatatgagagcgttccagcttctcaatccagaaactgctataaatatggtgcgaacaatctttgtcgagaatggagagccaaattttgtgaatagcagaattctctctgcttgttgtagacacctgactggtgctcaactatcgttgatcctcgggcgaagagaaaaccggctgcacattacgtcaagtctattcgcatcggcattgaaaaatgagagacactgtatcccagtgatggagagcctacgacaatactgggaaggaccaattccatttacgcggggggtcctaaacaggctcatgcggttgaatggcagctatgaagttatcaattatgtctgggagcacactgacacgggaacagccaatatatcaataggtcgctggggttgcattttcacgggagtggaaggggtcaacaatgtacaagcactgctggatcgcgacggcggagtgatgataataaggcagcgcgacctctatggggctgatcgggcgcgacatgccagcaatacctggaatcaaatcttgcaatgggccttggagcgtccgcgagacaaattgcatatcacaccgcgtgctatggagctgatactccggttctggagaaaacagacagcgcggactctattgcagcaggaccagcgccaaatatcattccatgaggaggctttgaaaatcattgtggaacggtttgatcatttcgacctgcttacagtgctgaatgggatgcaaaacccgctgactgtgacggagggtatccttattgcggcgtcaagaaacagtcgttgccacagagagatgctccgcaccctcatagacagaatgcagcaaactgtctcggtcacccctcatatcattagagcgattgcgcgagcagatgaagggtcgctcgagttgctgatgtccaaaaacgacggctgcttcgaaattaccgatgatgtggtgatggaggtatttgagaacgatcgaaatgattgcaaaatgatgcgtactcttctctcccagaacaaagagaaacgaagtataacatctcaaggtgcagttgcaattgtcggacatgtgactgtggtagagcttttgcttcgggagtatacgattgctagcctgtcaaacaacatgattgtggccgccttatccaacagtgtcaacccctctcctatacttgaaatacttctgaaacagtcgagagaatggacgtttgatgggacttggtggggctcaattactcgggcactctcgcaagatacatttcagtggctccacgccaaagtctcggataacaacgtcacccccgaatccttcctacaaggtgccttgtcaaatccacgactgagttttcagtccctttgccatcttcttgagtcagttcctgcccaggagacaatatctcaacgcttggcaggttgcagcgcgaggaaccaaacccattccggccaccttgtccagttcatattggccaggaatgatgctcaattgatcttcatcactgaagatcttgtgggaggtggtctgggaacccagaggctcggtgatgtcgctttgaaagatctcctctgtattgacagcaaccgaatcaaggttacacacagtggggtatatactatactgcgctggtatgaccagagcattgtcgattgcctgatcaagagaacgggaacagacgttcatttcacagctgatctgattcaggcgctcattttgaattcaacccatggtaaagatattatgcaatggttgctgatggaagaacatatactgctttcgctatctcaactagccttgattattgaaagtggatgtttcaatgtcgatgttctaaaacagactctgactggcccttctgtgagaatgaccgagcctctttttgatgccatcacaggggctgacgatggatattctatgatggatgcatatctcaatacacattctattggttcgattcggattacagtccctgccgttgtcaaaatgattgggacacctcaccgccacaatttgccattgctaaaactgctccttcggcaatcacggacacaggtttacgtcgcacaacctgtcattcgagctgcacttcgagcattcaatactcagaagcttgaatcgtttattgacattttaaagctattgatgacgcgaggagacaaaatctttgcagacaaagggtgcatggcagaactactcgctcacaaatatgcggaatgtttgatggtgacaatttgtgatcatacccttgaggaggagcttataatctcaaatgatatggtcaaggggttggagcactacgacgctatcaaagtactcgtgaagcgtgccaaattccaagttgtcattactgaagctgcaatgtgcaatgtagttgccagacctggttatgcgatagacattcgtctgctgatttcacggccaaactggaagatccctatcacggagatcgttctttgtgcagcactcatgaaaggccgtcgcggatcaaatcatatgccggccctatttcagcatgcgaggcacgtacagctgacatcggtatttttcaagaccctaactgaggcccaagttaccacgatggaacccgaaatggagtatatcgagagtttcttagcatttttcaagacgattcgcctagctggttgtatcagagccgacatggtggatggtattgtcgagcactgctcttttccgatcgtccttgccctgttcgacagaattgatgatcgaattccgttctccaatagtacattgccgtttctagcaagaaaattcaacgagataatcattgcaatcttcctcgatcgacacggcagtaactcgcttattaacgaggaggttcttgctgctgccgcttcaaatggcgaacatgggcctgacgtcgtcactatccttctacagcgcagccatgtccttccaaccgagagcgtcctgctggctgcagccacaaatttggggcaaggtctgaatgtctttaatattctacttgctcatttgtccgagacatcaggaaatatagtggacacagatcgaaaaaacgatgcggtcgcattggaaggtttattagcaaaggatgtcctttttgcagggctcgagacgtgctttgccgacactgtgactaaatatcgcagtcagaaaatatatttcactggcgtcactctccaggatcgggtattgcgtgtagtggctatgttgattgagtgtggagtctctgtcgtcttcaacgaagatgatctcctcaggctttttgaactctacacgctgggcccccattctcatttcatcctgcagacacacagagggaggttaccggccttcacccccaatttgatagcgagagtccgattgcgagtcacaaagtacctgtcttacaaggtgttccgttacgacccgttgtttgtacccgcaattcacctggcgatcagggatattgatcccataaccttcaactctttgatcaagaggagtgaacgtccatcccaggaggtcagcgcagtggtggagtcatgcagtcagcaatggcttgggaaacaaactgtgctccaagtgttgaattcccaggaattggaaattacaggagaaatgataataaagggagcgctcgatcaatttgacagcttcgagctgttacgacagccaaatgtcaaaataacacgtggcgcattgcaaaggatttcgcagcaccttaacccatgggacagctggggcctgttggacctgaatctaagtctgagattgttgacgaggaaacctggatcttcatggtctggaagttcaccgacctcgacctgagtcgcctcgatcccagtcttgtggactggaaagaggtgatcgaaaaagcaggccgtcgaggaatgatttcagaaagtgtgttgtcctcagtgattcgcacgaagaactatgatatggtcgacttgtgcctgaaaaattaccacaagccgctggtcgtgacacaacaactcgtggattcctttgctggttttcctcctcggtttcatctcgaaccgcgcgcacgtccagatgtgaagagcctgcgcaggttacttcaacatgggacgctcgttcaccccatccactcatctagtatcgaaagaatactcgagatattcggttctggaatcgcagatgaactcttaaaaatcaccgaaaatcggctattagttgacgaatccgtcttggtgtccatcgtatccacaaaaaacgtgaagattatcaagtcattcttcaaaagatacacggatcatctgactattacccccagggttctcattatggtcctgcagacagatgcaccaagtcatgttgaggtaacaaccaacgatgaatatggtgaaccagacgagacctcggagtgcaaccccggttggcctgaatccgacgaactctacgacagtaaatcttctgatcactcgagcgtgcttaaacctcgccaatattggtatgctgagccgcaggtgcccaatgatgaaagggacgctgagaatctgaaaatgaacgaagacacaaacacggcgtactacacctctgcgtatttacttgaatatctgctacgctactgcacatacgaccctatggggcttacgaaagatattctcctgtctgccgtggcgaatagagagtgtgaggccctttttacgattattgccaaatactacagccttgaaagcgtgagaattacgcaaaacattgcccaggctgctgcatccaacagcaagcgaaatgtgcaacttctcctggactggttcccgggaaaggtcccaattacagaggacgttcttattgcagcagcaagaaattctaaagagagctacgagactcttcggctactgttctcttgctcttcgtaccggatatcagtatccaaaaaggtcatgatagcgctgttgcagaatcccaattcttgcccttctgcctttcgacttgtgtttgaatatggaggtagcagtctactcaggagccaggaaatcaagacttcgattgttagaaatgcaggaagaggctcggttttgcagttctttctggagcttcctgggttcagcctgacagtgaccgagaacatggtccgatcgaacgaaaacgacggggaacccctaataagcagcagtcttctatttaaggaccgtagagtcaggttttcccctgcttcgattgcattcgtcatggccaagggagacgcagactccactatgtccctgttggagaagctcgccactgaccgagaagaccaccacttaacggagaatgtcttcctccatgctatatcgaatgagcaagaacgggcttggtttacggtacatcatctattgccactcataagcaagttcctcaccgagaaagcctggatcgcagctgccaaaaataaagttaacgggtggactctgatgcaaatgttcgcagattatgacccaactttagaatcaatgactcccacggtacttttgcatgctgcacgcaatgacctgctcggcaatgacattctcaaatggcttttatcttaccatccgtctaaagttcggttctctgagggcatcctggcagctatctcggggaacccgagctggtggacgggtgagcctctcaccagcgagatctatcggccccatatatggcagaatggccccatccttgaggtaatacttcatcaagcccaggagaatgcaaagatcacggagaatattcttatagctgcagtcaagaatcctacgcacagtgctcggtatctcagagtattgctccaacatcctacgagagaagtcttgaatcttcaaagggtcgcagcaatcgctgcagcccaggaatccgtggaaataaaatcacttctcagcttttttcagcacggtgctagaaccaacgaagatatagtggtagcagcaatgagaaatagtcaacgtggcggggatattttcgagctgcttcgcgtcgagaatctctggggcgacttcgttgccactgataaagtgctgtcggcagcagccgataatgcagagaacggaaatgacttgctcgaagactttctgagatcttatcagggagtcattgtgcttcaagacgagcatatcgaaaaggtcgccaactccttcagcttggatgtgatgcgtcagttgcgcattcgccagaggtttcctgtttccaacccgctacctgttttcgcttattctcactatcttttctatgtcctccatcgttggtttgtgctatattgttgagatttttagttgtttagtataacttgtagccaggactagggccaggtctcataatatagtccagcctcggctgtgatagcatggctaaagctggtgtttttcagcgaggataccttttatatctcctgataaaggcctgcaggcccgtaatattttaattttacttctataagcgaggattattactctttatttttttaatctagtaagactagtttaaaaatatatactaaaaagagtatatctattttatatctactttagagatatatatatagttattactagtaatataattaaaattaaagaggctaagccatattgagatttttattaaagagtacggcatatattaagtagcctaagtgatttaattaggagatatagtattataatagtataaattttatagctgtatatagaggtctaatcatgtctataatttctggaactccaagatcattggcagaaagccaaggtgctgaattattgtgggcacacaaacaccatgcatgagctgaccctagaactggaaacgagtaggttgaatctatgcactcttaacttgcacgaccttgttctcagtttcatcaaccaacacctgtcttctttccgtactcttctttcgaggattgggtgcatcaaagatctccgtgagttcttcgagtgtccggttattcgtttcaacagcgaagaagtagatgaatactccctgaacaatgttccagccagccagaatgatatatgtgtgccagccaatagcctcgatagcatttccaactccgaactgatttaccagcaaggcgatattagtgaagagagagtacattgccattcccttggcgcgagtctcgtatgcaagacattcaacagcgtacatggcttgcaaaggagtccatccaaagctgtaaaaagcggcgatcaagaagacaaacacaatagaagcagtggccgcgtctgtgttcaatgtttccgagtacaccccggttgtggctgcaaaactcgcaaggccgatcttcatatcgaaaaattagcggagaacattgataaaagcagagggcgggacgtatatacttaccgcgcaagcaatagacacgccaatcatcataggtctgcggcggatttttgggcccaaataacttcccagatatgctagacctgcagaaactaccgtgatgccaaggttgacgtccagcacacgctccgtatcagtaataccagctgtggctaaaagcccaccaatatagtaggttgtaacgccagcctgtgcccattggctcataaaagatgcaatagccacacacatgagtctccacctcgcggcctttgttctaacaagagacctaaagtcccatgcgttcttatcggaaccttccatgttgattgcctcttcatagtctcggatctgtagttgaacataggcattatcccggaaaccctcgccgtggtacttggcaataatatcccaggcttcctcgctgcggccatggctatagagccagcgaggtgactcgggaatgaaccaaacagacaacactataatgccggatgaaatcagctggcaccaaatggggatgcgccatgcaagagaactttcaaatctcagacatccacgacaagcgccagcagcagcaatagctccgataaaatactggcaattgtaaaagccagtcagaatatcacggtatgcagggtgactcatctcgacgacataggcaggtgcggcggagcctgccagggagtatccccaacctaagatatcctgttagcggagttattcgaatgggtagtgactaggaacataccaaggaaaaatcgactggcaagcaattgatccatgtggttggcagtgccaccaacaattgtacccagaatgacagcgcagcatccagtaaacatgccacaccgtcgaccccaagtatctaggatgattccgacaaatggcagcgcggagacacctccaatggtatacattccctgaatcaacgcggccttggaaccgactaagccagagccgaaggtttcacggaactgctctataggaagtagagcacccataagcgagccatcgaatcctggacagcagttagtggttaacttttcatagctatcgagtgtttccctcgtaccattcaatgccgagcaaagatatgccacaatcaagaataaatataactttctcatctgcacgctccacggtttcgggggatcgctccgcctggctaagtcgagagccagtgagccgtgaacagtctcaaccttgacgccctccttgacgccatccccgtgttcttggtgcgtagcatggcagtcaccttccttctccgctagttggtctggatgtgtagggtctcccatgatgctgaaaggtcttgttctccacgccgtgggaggtaatccgcaaagagtatgacccaattcaacgggaaaaggatggctgcggggtgttatttattctcacaatcatgggcttccttctctcgccctcgccgacatgaagtggtaggtttgtgacagtctccgatgcccatagcacaaccggattctgtcaaattccttgccctacgtttggccaatcacgacagtcttgtggcaatgacagttttccgggacgtgcgcgtctagatccgcaagcccacgtggacagacggcgattggccgtctttaaactttgtgggttaaaagtctgcgcaagtcttgcccggccccgattgacgcggtgccggtagccccgtgaatttctattgggcccaacatgctcattctccccgcaggactcaccccacaattcacggctccgatagacccgcggggattgttggagacccgggggtgactccatgccgagcgtacataccgacgactcttttgccgccaggtccataaaatctgtaagatagtcttaggtccttctcagaccccgacgtcatttagtctaacaatatggtataaaggacgcagggtagcaaagctggccccaactcagtcaacgaccctggagtccgaatttatttccgtcaaattcccattctaggaccatgagctctccggccaaacagctggccttgcaggccgatcccgaacggcccgatttcatgaaccccgcggtctttcgccgaaatacccttcccgcgcgttcttaccacattcctagcacatctctgcttctcaatggagcctgggagttcaacatgtcccggtcaccaccggaggcaccggagcctagcgaggatatctccgccgaggcctggtcgagcatcaatgtgccaggtcattggcagttgcagggttggggaaagccaaattatacaaacacacagttccctatccctgtgtgccccccatgtgtaccaaccgagaacccaacggggacataccgtcggaagtttcaagtgccatccgagtggaaaaccaacaacacagagattcgtttgcgattcgacggtgtcgatagcgcgtaccacatttgggtgaacaaggccttggtcgggtatgcgcaggggagcagaaacgcctctgaattcgacgtcacatcgtttttgcaggacggtgacaatgaagtctttgtgcgggtgtatcagtggtcagacgctacctatatcgaagaccaggatcagtggtggctctctggtaatacttaaatggccctaagtaacccttagtaggacagaggtatgtgctaatatggatcatgagaataggcattttccgagatgtcactttgattgcattgccagccgacgaccgcttgaatgactggtttatccgcactgaactcgattcagagtacagaaatgcgacgcttctcgcaacaattgactaccaagtctccgagccaagcgctgttgtgctcaatttgattgacccggtgcacggcagcaggagcgtcattgcttccaccgagtgtattgtggagccagcaacatctacagtggaattaagcttgcctgttgccaaccccaagaaatggagtgccgagcagccgtatctgtatgaggtggagatgctcttgacacctcgcggatccaacaagccattcactatcacacagcgcattggcttccgcaaagtcgagcgcaagggtggtctcatcaccgtcaacggaaaggccattcagcttcggggagtcaaccgacacgaccaccacccgttgttgggtcgtgccgtgccgctggacttcatgcgcagagatctacttctcatgaaagcccacaacgttaatgcgctccgctgcagccattatccccccgatcctcggcttctcgacatggccgacgagctgggcttgtgggttatggatgaagctgatcttgaatgtcatggcttctatgatgctgtctcacgcccaatggacatcgatgaatctcttggctacgaggagcgcaaggggttgacattcccgcagtgtggtgctcatacatcagacaaccccttctggcgcgaagcgtacgtggatcgagttcaatcaatgattcaacgagacaagaaccatgctagtgttattatctggtccatgggaaatgagtctttctttggcacatgtcaccggtccatggtagagtatgcccgcgctttcgacagcactcgcttgattcactacgagggagacatgcctgcggagaccactgacatgttcagctacatgtacccggagatcgaccggctgcgatccttggcagccaacgagggtgtttcgagtaatggcgagtttgagaaacctatcattctctgcgaatacggtcatgccatgggcaacggacccggcctccttacggaatacgagaaatgctttgacgagatcccgcgtctccagggtggtttcatctgggaatgggccaatcatgggttatacgttgaaggaaacagcaagaaagacggcttttatgcctacggtggtgacttcgatgactatccgaacgatggaacattcgtgatggatggtctcctgaacagtgcccatcagcctctaccgggcctgttggagctaaagagagtctatgagccagtcaagctggaagtctgtggacagcgcttggccctgaagaaccggtacaactttttggacctgaatcatctccaagcttcatacaagcttgaagcatttgacaaggagtgagtccacaactctcgtttcaataaattgaagacattctaacttttcaacctagaacaaaaaccttggcaactggatcgctagacctgcccattgtgcccgctgggcaatctgctgaaatttctctcccggaagagctattccaacacaacgtccaccccgcctacttgaccattacccttgagcagcgaggaaaggtcgaatgggatgagggaacttatgccgttgcttggacacaagctttggtatcacagccaaccgagcaagggctagtcaatggcttgggctctgctcagagcgctctctcaacaaactccaccaagacaactatatctgtcagcggagccaactggtcctttgagttcgatcgcatacgcggacatctcaggaaatggacacacaactccagatctattctcgagccgagtcccgacacagggcttgctatggtacctggtttctggcgtcctccgacagataacgacgtacctcaggcagcgccgtattggaagcgattcggtgtgaactgcctcacaaaccaattccgttctctcaacggatcaacactggaggatgggagtgtctgcatcgaaagtgagacattcatctcgcctccggttctttcttggggatggaaatgtcttgcgcgttataccatcaagcccaacggctcattatccatcaccatgaacttgcaacccacgggtgccgcaccgtcaactgttccacgggttggtctcaatcttcgtgcaaactctgatctgcaggcggcacgttggcttggacttggtcctggagaatcgtacccggacaagaagattgcgcagaagtttggtttgtggaatgttgatgacattgcgtccttgcagacggtgtatgacattccacaggagaatggaaaccgcatggatactgcctgggtagaaattctcgctcccaatggcacgggcttccgtgcaagccctcaaaaaagtacagtggtgaatgggggaacgggaagcctgagctggacagctagccagtactctgatgagactgttgaggcggcacgacacacttgtgatctcgtaaaagatgatgccgtatttgtgaggttggatgaccacgtcgcaggcgtaggaagtgcggcctgtggccccggagtcatggatgagcatctagttaaggtgcaggatctcacctttggtatggtattggagcctatatcttcgtgagaactaaaaagctagatcttggtttgttcaatagattgcagtcccatgtatactttttaactaattcacccataactttttaatctgaccagttcgtcagatttcagtcttagtccacagctataaaggttctatagaagcaaactagtacacatccctggtgtcgtaacactcggctggtataccacatgagccgtccgtctttgttggtaaagggcaatttaggatggccctatgttgtggaaacgtctctacaaggccaacataataaggatccattaattatcattagacataaatatgtaaggcctatttataccattcaattctagcgctaagaacaaacgagctttccttgtgtgaccctatactgaatacttcgtttactgtccaaacggtgaatgtttctgctttggtgactattcatgaggcagggcaaaaccatgtccctgctggttgtttcaaggctgaaagtcgctgaagtctcgggatagcaaggcttctagagagccggacggattcaaataacccccgtaaggaccgagtggttgcaatagcggcgcaatagagttccaatacgtgcttttcaggctcttctgagaggcagaagggtttgaacaagagagatctatcgctgtcagttctgcattattgaaggcaatagagttttgagatatctgaggcaggttggccaacgccggccggactcccgggacaaaggacaacgggtcgtgaactaatagagccccaattaactcttgagttctagacaccaatccgagctgtgttgagatagttcgagacacatcgagtcacattgatagtgccgtcttgtttactaagtggtatacatttcccggactttgctaaatggcttactgacaagtactatctgagaggcattcgaagggacacaggagagagatgttgttcctcctccccgcaaggagcaaagtctgcacttttgctttcgaagaacgcgtgggctttcatgatgagtctcaatgccttctccatactgggagaaacggaggatccatggatagtcatccatcgttgcaaatgctgctccaggcggggccctagatctagcaacggaatatggcgaagctgcattgtcagctgtggatgacagaagccacccatgagagtcaagatcgctgtctcgagtctaacaagataattcgttgtatcagcaacaatgcccaacagttgcgaagtcttccggaatcagacttacgagagcgaacatggccatgcgtctaccatgacagtatatggcacctgcttcaggtgcctcaatttgaataggcaagtgtcgagggcaacccgacagccatcgagcacacgcagattgttgttaagatcccacaatggattagcgagggcccactccagatatggtcgatagatgacacttcgacagctgaggtaccactgtctcaaatactcgctgtgcgggtcgtctgcaggcttgtcgtcttcggggaatcgcagacttggaggtagggtttgataccagtcgtgtagttggcgtgccagttcttggttcacggaatagaaattattggaatcaatttgaaggcccctgtcgcggtcatagagcatgtagtgggcgcggttgaggaggcgacggagtgcaatggatgctagaaagtagaagttggacttttcttcctcttcaatagcttcatgtgagtggaattttcccggaagagcaaatactgattcgatttcagtattgctgttttgcggaagggagggcaattcagagatatagttgctagtgcgagtcaggcagtgataagggtaaggtgtcattgccattgcttacctttctaatacaaagcacgaccagaatattctagtgatatgttctcggtcatcacgctcggggttgtcaagagggcaagagagcaggaaacgagaacgggtggccgcgctgttcacataagaccacgtttgcagtggcctttgcaagaaggagaagtagagactacgcattcgtcagtttcatctggacacgctgtttcggccggtaacaatgtcatcatacccagtcagcaagaggcattggcacgcttccatattcatttcaatttgggctaagtggagcatcttcattgcagcagtgaaccatgattctccttggagcttcagctgttgagacttgctttcagaactgtcctcttcgtctatcacggacgcgccgacgcagcccaaagccatgaccaacaatgcgagacacgattggcagctaggctccaaattctcttgccatatcctcaattgcagggatttcagctcgtccaagctgatggtagggaaccaaaagttatacgtccgttggaatacacctaccatatttttgacatctgacaagcccgcgctggggactatgccatagagtttgcttggaaatgacggtcgtccgtactcgagcgacaaaaatgaggactgtgcctcctccaatattgaagggtgatcactaaacatgttccacttcaaaagagactctgctgaggagagatgtcctgatgaaagcaccgcgctttcagtggggtccatagttgtgcggccccctggatgatggcgtgcatcctgagaaacccgggtaattgtcggacaggaagacgttgtatctgcctgaatgtcactcgtcacacttgaaccggagcccatagcctgaaatatgtaatcagcgagtgagaaatagcgttgcgccattcgttacatacgaccatgcccttaagttcatcaatggaagcttccatccgcaagaccgtatccaagatcatttcgcttttcccccttctgatctcatgtcaattgccgatcatcagcatggcaacaagtcacttacgatgtagcttctgttccatatgaacacatttggttcaagctcacgcagggcccacagggatcccgagcgtcacatctgtcaatcttgtcaatcgccgtgtactacaaaataacatgtgacatgactagccttgtcttgcggtggcggcatgagtcgcactgttgggttgggttgtattagtcttggtgtctcccgaggaatggggacacggaccgctcgagccgccctgaatctcttcatttcgagccaggacgctggtattaaggggattccccgtgactgaattcttgatcagcttcgacaatgagcttctattgacagcaattgagcgaattaatagtgtaggcggcgaagactcgggtggaaaagtcgcagtggcgtgaatcatgtgaccacgatagggcctctcaccctccgaatgactaatcggcatccagcactgtataaactatcgacctggtagattagatatattgaccagtatattgatcctatcctacaggttagatgctcccaattgggaatctacatgaggacttggatagctatgtagtcctctaggttgttgttcagttggtggttaggtctctacattctaacttaagcttagctgattataaagggcttatataaataaggtctagcggtacgatggcggattgacatatgtggtaggtgagaggcaacacgccgcagtggagggggccggctatgttatatttaggcccacaacgtgcaaagtgggcaagcagtaaacacgacaaaaattgagggagaaaaagaacagcagatatcttggttgttggcaggatctattacgcaggaacccattatcatacctggaaacagccagccatccataaaagttaagtagcccggccacccttgcaaaggtctcatacccaagggctttgatttgcggtcttgaaagatacatcacagatcggcttctctgtgaagaaggttgagagcaaggtgaaggttggaaggtgcgtagaagatataaacaagagttgagtggctttccaagcaagtctaccatttgaatattcaaaccatcgagagtctagtattacgtaccggctgctgtggattgtgcgattgaagctattgattggagcgaagggcagaaacaggtgcgcagcagagctggagctgtacgtcgaacgactggcggcggctagtagggatcaaagaactagctttaaataacaagttaataattaatctaggctttacaattagtatatacctggtggacactggtatgatacctggccaagtctagggctaggtctcatattatagtcagccttggccgtggcaacatgctcgtagctggcttagggctttccgcgatgatgcctttcgtatctcctgacaaggccctgcaggcacgggatgccgttgctttactcctgtaaagcaggaagctattgcccttcgtctttcgaccaggcggggcctgttcagaaaggtatggtagggcgggcaaaacagcatacctacctggtgcctattctgaaggcgtgcacatgcttaccccggcaatataattggatacctaactgctaagccacgctaagctctcgactaaagagtgattcacataccaagtagcttaagcggctgttgaccacgggacatagcatcatgatagtataaatttcatggccgcacgtgggggcctaatcatgtctgcaatttccggaactccgagatcgttagcacaaagccaatgtgctgggtattgctttctcagcaaaagagagcacgtgtgtgaagcttttcgtcgtactggatcgttgaccgtgttggcttacattggcttacggtggttcctgcgttagtggccccgtaggtatgtagtcccgcccgtgcaagtggccaagggcaaacatcgtatattctgtataattatattgtcaagcaagatgcatatataaagggcagcttgatgccatgagatgtcaagttccaagcctttcatagttatcactgcccagacggggattacactatggatctcagtcgccgcattctatgctttattttgtacggcggcctggctgtcctcgcagaagctacgctgccgggacatagtacatgtatagccagttcttcagccagcactccggtcaccgctccaactagcactacaccgtcctttccatcgacccctccacctattgtgtaccaatggctctatggccttgttgcccccgactgggacggtatgaactgctctcttcctgctgcaactgacagtgacatggaccccttggagcggtgggagcagctcaaagtcgaagatgcatggaatgctgcggtagacaattggaacaccaagggtaatgacggcggaacgcaattctcccagtcactcggctcgtttttcgaatatacggaaaccctgttttgcgagaacctagccgataatgatggctgctccaacctccaagtcaagtgtgatgagtttaaccaccctgctgggtacatgattgtactctccatgatctggcttgagcgtgtaagtcattcttactttcatgaaacaatagtgctaataaacgtactcagcaatacttgggaattaatagcgctatcaccgcgggcagtaatgctgtttccgagcagctttcggatatgcttgggacctttgcccctttgaaagaggagggtcttagtgttgacaatataatcttggatatcattagcctgggcttttccctctctatgtcaccgatgtggaataaaggtaagtctacctatactgaatgaacccttctggtgttaatcggtctcgtcaaaaagttttcaaagaatcgaaactcgttgctaccaagatgaacaacaaggatttggccaatgagctggggacagtcaaagactgggtaaacccgctggtcacacggcgttcttgtactcgcctcgaaggcactcgaagcagaagaagaagatacaggcaatcaggaacgtttcgtctcgctgcgctgtctcaggctgtattgacaccaactctcgtatggctctattgtagtgaagcagcataaattgcgcgtcggtgctgtttgccagagggcctctcccatggaggacaaaggaccgatggagagagcccaaggcgacggcgatgctcctcaaaatgggctggtggtacgccacgcgaagtagcagaacgccgatatctgcggtgaacgcctgggttgtattctggtggaagaattccagagagcgatactcatcctcgctgatgaggtccggcgactggtgggtcttccacatgcgagttggcttcgagataccggggacgtgctgtactacccggaggctatttgacgaggcaccctcaggagaccctgaatccaaaccatctccatagccatcacaccttcttcctgcattctcgcacctgcggcaagtaggtctcgtctcgtcgcatttgacgcggcgggtcctgcagtgccttatggttaatagcaagccctaacgggaggacacaccaggaactcacttgcaggtaatgcaaccattccgagacctggccgtcggcacacgatcacttggagaagccatgatcaatatccaatatcctctcgatagctttctcatgaacgcctcggtcggaaagctggtcttgtactggcgcatactctgggccgtgcatgagccgatgcactgcccccgcgtgaagcccaattgccccattgctttataccagctaaacccaccggtctttaacaggcaaatactttctgacttcatggtcttcggtccgggattccttggactttcatcaggccatgcgccgggtcctggcgggatttcccaacagcccaaaatacatgggtggataggaagcaccgtttgacaggcacggcccttacctaaatcctacaaggtagactgctagtaaaatgtgacatctggcagtgagaccaagatagaaagctcactgggctcactgtgatgtgatgttcatggctcgttggggtccgtttatcgcaaggcgcagttcatcctccacgctttgaagataaccgcaggaatcgtatcagactcaatgactgtttatttagcctataacttccagtcttgccaaacaagcctcggtatttgttccgtcggtattatgcagtcccttcggttatcagcgcacggagtacgaaaagcctgggctttggggggcgagtgttcctgtgcttgtttagttaatctatggtagcgccattaattttgagcaatatagaagggtaaataatagcgagcaacaattttacggttgaatagtgtccgtggacacatttctgcaacggacggtgtttgcgatggtcgaaatatttatcttcacatatgaataacaggccgacggatactcggcgatgtcgaaggaaagggagaatgccacgaattataaccatcatagcctcatactgttcgttcacggctatcttctagcagatgtgctgctcaccaccgccggtggtctcgaccagcggcgatcggagacaagtccgacatttaaacgccaaaatccacgggccctctgatgctcaagaaacagaatttaattggacaatccactacactagtcttctgaatcagagagtggagagctcgcccggtgttggagcgatggagccagtgctgagccagtgctgtgggggcgagatgggctgaccgagtgccagtcatcgcagaggctctcaaatgtcttcatcctcacaggcgcaatgtcgacaagccagagctctgcccagaaacgaaaaagaccgtcctcggcgtgtaaacggtgcaaggaccagcatatccgatgtgatgcggagacgaaaggactcccctgttcgccctgccggcgagtgggcaactcggattgtcaaattgcaaagacgaaaagaacacggtatgcattcaccactgtagaagcagataacgactaatatagcctgcagaggaagcaatgggcgattcgcaaccagcgacctggccaccactgagtccatagcccaacccaaccaaacgacgcgcatatcggatcgagttcccccattctcgattgacgtcgtagccctgtgcaatagccaccgccgaagatgttatttgtctggtgatggatcattgagcggccaggatcgtttgtatgcaagcacgcgccatcgtcaggcgtccgctcctcccatctggggcgagagctggtatctgtcatatgtgatccaaacgacaaacagcgaccaaggctgcttatatcggcctatacaggatgaacaaggaaacactgcggtggctcaccatccacgccgcgatcacaggtcgacaagcatatcgcagcaccttctgccccctgcgcagctagtcaatgacctgctgcgtggctacttcgttatattccacccattctgtcccatcctagaccgggaagcattcctcggttccgtgagcgatgggtcagtgtccaaggtcttgctgcgctgtgtgctttttatttcctcgatccactgcgatttgaagacgatacacctcctgggttattccggacgtatagaggcagaagacgatcttttcagctccgcaaaggccgcttttgactgcgaaccggaaggggatcgtctggtcatgcttctatgctcttatctcctccactactggtccggatctgccagccagagtagagactcgctatggtggctggctggcacgattcgttctgcacaatgcatgcagatgcatcgcaaggcccagcaaaggaatttccagccagaacaagagcgtatgtggcgacgcatctggtggttactatacgtacgtacctttacctggatcttttattgccctgctaagccatttcgaccagattcgtgatagacagatatcgatctcgctgggaaagcccatgatcatccacgactgcgactgcgatgttgaactcatcagcgagggtgatcttgtggatgaatccccagaaacaattgcatatgtactggcacaggccagactatcaatcgcaggttagagacccaaccctgcttcagaggaacatcactgacggattagtctcgaacgcactgagaacatatttcgcaccctcaagggactgttctatctcagacgggacaatcgtacttgactctatatgtagggtgttttcaacttgggaagagagcctctcgcctggtctgcaatgtcgttcgactggcaatgcccagcttcagcttattctcaatctaacttctaagtaagtggaaggtttcttaatagaaaagcactaaatgtggtcagttactatcgcataattgttcatcagaccttccagcgcacattccaagaccggcaaccaaatacgaccacggccagcaacgatataataatggatgcagccgaacggattacctctatggctgaagacgctgtcactcatcataaaggaagccacttccccatgatctggtatagtccagcgtgatacgctgccaagcatagagaaagtgactagagctgatcgaatatccagtgtatcggccatatttgcagcaatgactgcgcaattcacgcacgcaaatgccacaaaccaatctacgaccaaaaggaatgcgctactggggtccatcaagtacaaaatgctcgctttgaaggattttgaggagtgccatgtgctggcaggctggatccgccagttgttctttgacatgtttgagcaacaacgtgggcaggacaagaatggccacagtccagaggccgcaggggaggacttcaacattccaaattcagaggcactagatacagttggggacacttcgatggccctcgacgttgacagcattattgccgacataccgcgcccggccccgtgggaattgccctacacgatgtccaatgacaatatcctctggcacaattggctattggggtatcaagacgggggatgatagcttgtaccccctccctaggatatgagatggcgtatctaccactctacctgaatgataacagactaccttacagattatagcggaaagtcggtgccttgtcgcccatttcgaatatcccatccgggttctggctggccgttgcttctccacggtcgcgtttagcattgatcctccgacacaggaaatagtagaggaccacggtcaggaagcccaatgccacaaaggccagcaccagggagtgtcccaggcgatacctgggggcgtctgttttcttgtagaaattggacgccgccgcgcctcctaaactcccaagcccaatctgaatcgccattccgacagcgcgtttcgtagccggtgcgtaattgttggacgacagggctaggaggcccggtatagctagactttattaatatatcatccgtgactactgccgaagtagtagaggtacctgggtagctgccactggcagcgataaagcatcctgcgtacgtcaagcctggaatgaatcgactgggggcaacggcgatgaggaagccaacaaatacagcgccatagcagacaagcgtgaagagactcctctggcccatccggtctgagaagtagcccacagcaatgcacgctatggaggcagcggcgtagacggggatggtcagcagctgcgcgatggcggaactatatcccaggccttttataattgtcgggaggaacagcgagagtgcatacacagctaccgcctggaagaccgttaagaatgttcaagtggtttgtgcagatgtcttaccgctccccagtagctgatggcgtgcatccatgtctagagatattgtgagtgccgctgttgtattaaaagggttgataactcacttgccagtctagaactgctgccaagaattgtttccagtcgaaagcactcttctcttccagctggccttcgctagagctcgctcgcgagtccgccaacaggtcgatgatgatggccttttccctgtccgacagaaacgtcgcggtcgatggctcatcccagatcacgaagaaggccaggaccgcgcacactactgtcaggagaccttccaggataaatctgcctcggatcagcttcatatcgtggataccaagtaacagcaactcacatccatctccatccttccaaccctccgactccatccatcttgctgatggcaaaggccagaagaccggagaacgccccggccattgaggcagaggcgaagatgagggcgagtctgaactgtgcatttgctcttgggtacctgactaggtgagcgtttataccgcaatagatggactagaatataccagagagatacgtagaacgcgaggccgggaactgtagcgggtcaataacaatgaccgagagtctgaatgatggatactaacaaaggcctccctccgacaatcctgcgaagtgtcagctggatagcagaagagggatgaaaatatggacgctggtgctcaccaagaaagaacctcgccgccaatagaccggagtaattctggacaatccctagaagcgttgtgacgacacctacacactctaaatatcaaatttcaaagactctttattatgcaggcacttaccccaggccaccataatagagggcagccaaatgctgggcttgaacctgacaagcaacaggttgcaaagcggctcgaaaaaggagtatggaaagaagaaaatggtcaaacacctgggtctgttagctcagcttgagggtaatatcccggcaaatcctaccagttatactgattcccaacgagattcaagtcagtcgaaagcccttggatctcagcatttccaatgtttcctagtcgagtcagcgtagaaattcatggcgacagaaggaacaaacctcggtcaaggaagctgaggaaatacaagagcgcgaggattggaatcacacgaaggtcgatctttcgcagcagccggcgcagctcggtagggcagggttggttggcacctccaacagcgtcaaccttcggcgaaggcgcgatctcctgcgacagggtttctttctcagaatccatctcgttggctatctatctagtcagaccgagcacacgagacaacgacaggaattcacgagtcctgcagcgggcgcaggcagagtcttagccttttagcactcgggggagggccgactctctccccagccgctaggggggatacaatgtggaggcggggacagccagccactagactggcctgtgcagcgtaaagacacggctttggcgcttgcaggattggagactgcggagagaagccagcagatcaatgaattggcagtgggccttttcctgcgcctgcgccgagtctgtgctgcattgccgaccaccgccggtggtgaatctggcgatgatctgcatatcaagaaataccttgtataaatgttggccatgctggacattgcctggcatcttattcggtccaggttgtaactatctgcaacagcgggactacaaacatggccgagtacgctcggtttcccagtcttccggacaatgcaaagcatgaggacggaactccggtgctgaatcgtcattctaccttcatcacgagaggacatgacttccctgctgccaaggtactatttccacttcgcagtataccaatcgagcgtcatcttacaccaccaggctatgctgtacggcgcaggagtccccgacccagaggcaatggcaaagagcccacatgtcggcattggatccgtctggtgggagagaaacccgtgcaacatgcacctgttggacttgggaaaaacggtgaaaaaggcagtgcaggagcaggacatgatcgcctggcaatacaatacaatcggggtctcggatgggataacagtgggccacgagggtaagttgatctaacacttcactacctcgaaacatccaactagttctctgtaggaatgcgattctcgctccagtcgcgcgaaatcatcgccgatagcatcgaaaccgtcacctgcgctcaacaccacgacgcgtgcatcgccatccccggctgtgacaagaacgtccctggcgtggtgatgggaatcgccaggcacaacagaccttcggtcgtcatatacgggggatcaattcagattggcttctcgaaaacccttcgcaagcgcatcactctagggtcggctttcgaagcagccggtgcatatacatacgacaccttgcaggacttggccaccgaagacagcatcaaaggcctccacaccaatgacgagataatggacgatatcgagcaacatacctgtcccactgctggcgcctgtggggggatgtttactgcaaacaccatggccacagcgattgagtctctcggtttgagccttccgggctctgcctcaacgcctgcttcctctccttcaaaaatgagggagtgcgtaaaggcggccgaggcgatcaaggtctgtttggagaggaacatcaagccgagtgatattctaaccaagcgatcctttgaaaatgccttggtcatggtggttgcccttggaggcagtacaaacgccgttctccatctgctggccatggcacgaactgcagacatcgaccttacccttgacgatatccagagcgtgagcaacaggatcccgtacatcgccgacctcgctccaagcggaaaatactacatgccagacctgtacgaaatcggcggcatcccttccgtacaaaagttattgatagccgctgggcttctcgatggcgatatacccaccgtgactgggaagacgctggcagagaatgttgcagggttcccttcactgcctgctgatcaagttataatccgcccactgaatagtcccatcaaggaaacaggccatattcagattctgcgaggaaacattgccccaggcggctccgtggcaaagatcaccggcaaagaaggaacgcgttttgttggcaaggctatggtttttgacaaggagagacatctcaatcaggccctggataagggtgagattcctcgtggcgagaacattgtcatcgtggtgcggtatgagggtcccaaagggggcccagggatgccagagcaactcaaggcaagcgccgcaattatcggagccaagctaacaaatatagccctgataacggatggaagatattcgggggcgagccatggctttatcgtgggccatattgttccggaggctgcttctgggggtcccattgcggtggtccaaacaggcgatgtcatcacaatcgatgcgcagaaaaaccagatcagtatgaatgtttctgacgaggaaatgaaaagacggctgcacaattggaaacccccgaagcctgctataactcgtggtactttggggaaatactctcgtctggtgagtgatgcctctcacggtgcaatgacggatcttttctagacagataaacaatatacactctactatcctgtgaactggtatggatcatctaccagtaattggtattagtgttggtccgtatataattgagaatcagaatcatgttcattcgcattggctactattcatatcgaaaccacagacatcacgcagaaaggtgtacagcaacgagtgaactaataataccaaagagacaaacagcgccctaagcgagaacccatctaagcgggtcagaaggctgacggtattaggttggatgaaactacttcttaccctcaaaccccagcgccccagtcaccgagccaagtccaaggccatcgatgagcttgtcgattccaagtccgcccagcagtcccttgagaagacccccaagcccaaggccgtcaagcagcttaccaacaagaccgagtactccgctgagcaagagcccaacggcggcaatgatctggaacaagggctccgatagcagcgcccacagggggttgatcttctttttagcatggggcatgtcgctgatatactcccggcccttttcaatggtctcgacaatggtctgcgtcagctccttgagcaagtcggccagttgatactcctccggcgtggcttcgtgcgatgcactgcgagcctttgcggtagctgcaatatggccgtctggatcgagtgccctgagggagcccttgcattcttgcagcccattgcctgctttctcaatcaagggctttacgtcttttaccagctgctcctcgtcaagttcttcttttggcgtgcggctggctttttcagtgcgctatggccgtcagtatgatatcccagggtagtaaagagagacaataaggagagcttactgaggttatctccttgcaaattggcccaacagagtcgattgtctgctgcagaatggtgcacatcttctttgccagttctgcgtcttctttctccttcttctgcttctcctgctcctcaggggacagctctggctctggctctggctctggctcctctggtttgtatcgctctgcccggcctataacattgccagtcttgtcaatgacctctccatcctcgtcaacagcgcgtcccatcagtcgttgggggtcgccttcggtcagcctgccgacgacttcgcctgaagggtccatcaccataccctccttgccgactgtcaggccgtccaggccaaagaagatcccctctggcttttcacgctcatcctctgggatcagctctgcctggccaatgactttgccgttgtcactccagacctgaccgtttccatcgactttcttgccagacagcttcttcggattcccagcaacaatcctccccaggatggtgccatgctcgtcgacaacattgcccagcttgttgactgtgcccccttcaagggcggacaggtcctcctcctcttcttcctcctcagggacctcgtaccgctctgcgcggccgttgacgtttccatactgatcgaggatctcgccggagatgtcgacggtttggcctcgcaggctcttgggatcgccttccacgatcctacccaccacctcaccatccgcgtcctcaatgtatccagactctttgacagacagctctcccaggccactgaaaggacccagggattctcgctcgcccttgggaatgagctgcactttcccaatgacttctccatcatcgttcagaatttcacccttcttgttgatgcctcgaccggcaacctccttcagctcaccttcgacaacacgcgcaattggtacttggtcagggcccattacattcccatgcttatttggcttcaagccttccacagaggagaaatccacttcttctggttcaacctctggttcttcccacggctctgcgcgtccgatcgtgttgcctcgtttatccaggatatcgccatcgtcgtccaccgcgtacccaacaagtcgttttggatctccctcgaccagcttgcccacttttctcccgttctcgtcttggatccagctgtcctctgccacaaagatgtcacctaactctgaaaacaacccaggcttttcctcttcaacctctattggtttggccttgccgatgacatgtccttgattgtcccagaattgaccttcactgtcaagttggaaccctccccgtgagagcttcttggggtcgccttcgacgagctcgcctacaggagtcccgtctgctctgacaatgctgccgagtttgttgcacgtcaacccttccagcgtggagatgtcgggcaattctggttccgcacccagagatactccctctcctggttcagcctgatcttcctgctcgtcaggctcttccccctctggctgctccgccgatttaccgacggcctcttggccctggtctttcagttctcctgccttttgctggatgaggtcaactcggccgatgaggtccccatcctcgttaatgatctcgccattgtcgttgactttctgaccagcaaggtctcctgggtctccttcaacaacttcaccaatggggtttccctcgttatcaagaatctttccaccttcaccaacttcaagtccttccaggcttgatagatcttgcgcctgatcattgagttctcctgccttttgctggatgacatcaactcgaccgataagatccccatcttcgttaatgatctcgccattctcgttgactgtctgaccaacgaggtcttctgggtctccttcgacaacttcaccaatggggtttccgttgttgtccagaatctttccaccttcaccaacttcaagtccgtccaggcttgatagaccgagggcctcttgcccctgatctttgagttctcctgccttttgctggatgagatcaactcggccgatcagatctccatcgtcatcgacaatctcgccattaccattaactgtctggccgacgaggtcttctgggtctccttcaacaacttcgccaatagggttcccgttgctatccagaatctttccaccttcaccaacttcaagtccttccaggcttgatagatctagtggaactttgtctgagatatccggcgcttccggaacctcgccggcttggggcagaccggcggcctcctgcccctggtctttgagttctcctgccttttgctggatgagatcaactcgaccaataaggtccccatcttcatcaacgatctcgccattactattaactgtctgaccaacgaggccttctgggtctccttcaacaacttcgccaatagggttcccgttgctatccagaatctttccaccttcaccaacttcgagcccatctaagctggataggtctagtgggacattgtctgagatatccggcgcttccggaacctcgccagctttaggtacgtcgtcggtctggggcaggtcgtcggtaggtgccttgtctttggccgtttgagcagcatcttgaaccttctgctgattcagggtatcgtcggcttgaggtaagtccttcttattcgttgcgcccttggcagccttgagactgtcttgtggtttcttatccttcgcagcacctgctttatccttggctccttttgcgaggcgtccagatggagacgcagctgctgcctttccgcggctgggaagtgaactcagctccgagcccgacccggatgcatctgtcccaggcttctcaacctcgggcgcttgcttctgtctttgctctttgagcttcggtggtgtaggcttggcctgtttggcttgggggaccttctgtgtggcgctcttcgcgggcgccgacggggctttacccaggggtttcgctttcggacgtgctggggttgccattattttggttgtatatacaggattgcgtgttcgaaaaagggttttcttttttttatatagcacgtaagctgtcctaatgttgctttctgcgattggcacggtagtaactcgatgttttaggtatagtataccaacgcgccagcatcaaagtacggcgaatcgcgataaatatttttaaagtgatcgacaatctcccgatcatccagatctcgccatcaccatcgccatgacgatcccagtcccatcacctctgcgtcagtttgtcgcggcgccgcactggccgagccctacgacagtggctgtatgcacgccaatcggtacctaccgacgacagtatatgacaggcgcgatgacagccagaacagaaacaaccagggatccagtcgcacgcgcacagtcggtgccaccctgctgggacgaggtcataatacaggagatatacgaggagtggggggttccagacccacagagactacgcggcttgttcaaaagtcgacggattaggcaaatttaggagagcaagtctgggcgagccatgattcgggtcaagcatcgcggggaagcatcaacggcgtatagaaccgttgtggatggtggtcttagcacactgctcccagcatacggagtactggtacttgatatctattgctgacgtgggtacggtacatatagcatctgctcaaccacatctcacggaataaggaaccggcgcatcgagcgagctggatatatgcacatgatgtaaatcccacacgtcgtatgaattatcttatcgtcatgagccctgcttggtgtacacaggccgacctccaaggggttaatgctcttcatgctcaccaggccgtgcagggaccgtcacatatttgcaggaagacatcattcctcagtatattgattaggaactgcatgaaattagaaatggtctctaaaagtagaaacttgccaggccaaactcacagcaatgccaacgttaaatccccccgtatactagctttcaggtcaacctcgatgtcgaggtttaaatcaagtcgtagtttgagcccagtgtcctcttcctttccttttccctgtgcttgtcctccctgttgtgctccttgcccttgtatacgcccaaggccctgtgcctgcgacgcgtctttgttggacagctgttgcgacctgttgccttcgtatggttgcattgctttggtttcatcttgaacatcttcctcttctgaggcaatcttgggtttttgttgctgacgccgcggcctttgtcgcactttcgttggtttcgctgctttcggttggcgttggggtgcacgctcttgttcatcatctgaatggatggtgtagacatcgtcattctcgtcagcgtctccttgagctgctttaccagacatattcactgtaggactatgcgaggagcatggaatatcagcagtgttaagagaattgcaagctgtgcaactgcgcaggcgcctgtgtccgcgatttcagctcgcagtagaacggttcaatccagctgaataagatgatgctcaccccttttgcctggtaaattagtgctcaagctggctcgccactggaggtgttgtcggtacttttctgaccaagaagaccatgcgtctggccttaatcgacgaagcaatgacgccgtacccatgcaggcatcccagactgacaatataatgatgcgcgttcaatgacctgccggcctaccgaaccggtattctcatccaataccacttttcctagttgctgcagttacgtagatgtggctgagaccagtcccgaagcggcgcaggcgaatattgatagatgccagccttccacaacgtgtgtgccagtcccactgtttgtagtttgccgtttcacctatcagaaactaccggtcctgacatcaatactactgcatcaggctatcacagctgccactgctgctgggctttggtgcttgtcttggggcgaattgccaatctacgtaagtatagacatacctgaagcgtataccacagaacatccaagagctgtatcgtgctgcaaatactgcgtcccacaatgtcacagaatacaaagaataatcctacagaggatgcaccgaccgggaatgcatcccccacccccgcagccaagcgcaagccccctaagctcaggcaaaagccacccgccgaggcagcagcagacgattcgggaacaccaggaagcacaggtacccctcaacctgaaatgaacgataacgttggagacgagaagggcacaaagggagataaggcacctgcagataaccaaacgaatggggatgccccccaagacgaagcccagcaggatgcggaagatgaaagcccgggggatgacgaccccggcgaaggcacagcagaggaaaaagagcaaccggaagacgacgaagacgatcctccaccagaatcaccgccaactgaagagataggttctccagagccagaacctgagcgggaacctgatcctcccaaacgacactaccgtccgaggcggaccgtcacgcgtgagcgtgaaaggaatgcacccccagaggtctggggtaaacacgatcaggaccaatccggtcaacaactctcccgcctggctgatgttggacagaccactgaccaggttggggagcttgcacaggacgtcggtgggaaggccgtgggtgaggttggaaatactgcaggcaaggctctgggcagtgccgttggtggccagtctggcggggaagacaagggaaaggaggagcaattgagactgcgactggatctgaatctggacattgaagtccagctcaaggcgaagatacatggagatttgacgctccagctactgtgagttccgtgcatctagttgaggttgtatagctaacggtgtgtctagtaactaagcatgacggcctcggtctagtatttattctgtacttgtatccagtccgtctctactcgtatcaatgtctttttcaagtttgtgccattctacgagttggtgtctgaagggctgtgtatatagcaatctcaagcgacctatcatgaatgaatcgaatgtattcaatgagagtccgtgtacaaaacctgaccatcagcactattatcaatctgtattgagttacgtactaccagacagtaccgttctcgcctcctctctgccagtgactggaatccgttgcaccccttgtacaccctgtgggacaaggcccggatcgatcaggccaacctggcaaagcacgctcgcttgatcccagtaaacattctcagaagatattttgccaccgataaaacgtgtaatgctgataagaatgacctccacctgcttgtgtgttggggcaacgcctggtaggatccatggcatctcctggctgtgcttgaagctcatgtacagctcctcaacgactctgtctgcgcccgtggtacgggaaagaagccttaggcgcatcgaggtcggcgcgttcccaccaaagttattttcgtagaagcgacgaaggtccgttccgcccgacgcgccctgtgccgttggttgaaaggtaacagagggggtctcgtcgcctgtatagcagccgatcgaacttccgggcttggatgaaaagtatcttgctgaggaactcaccattagcgactggacagataatgtgaccaggtcaaggaacatagtatgtgaaatgcataccttcctgggcctcatcccatactgcctccaaatcaacctctctatggaatgccagctgcagcgccttcagcgaccgactccacgccaactgcgctggaatgtgattatattgtttcatgtccttctctgcgaaccctggcagagatccactgtacacatacgcctggtaccccacgctgagacgatctcctgtgcccattgccgaagtgatacgtctgacttctctttggctcttatgcgccctcccagtggacggatataccacagtgacatcctgcgcggcaaagtgaattaggacacgaactgacgatggataggcaagctctgggtcgatgatcctcgttggatagtaagctatcagtgcgcagagcttactggtattcggcgaatggagaaaatgctccaagcagaccgcggcggcctcgccgaaacctgacagaatgagcgctgcattgttaaaaggataaggagacacacttatgatggcatatgattcactgacgcttaatcccgtctttacgccctcgaggtcgtggataaaagctttcttgtccttgacaagcggaaggtatcgaacgtcaaacccttcgagactccagctgcggagaaagctactgtcaaaattgtccctgtctgcggttatgcagagacgagtagccttcttagtcgagacgaaaggtgccatttgatctaccgtatacaagtaacgttgtcgatactcccttcatggagcggctggagaatcatacaggactgccctcgacacttctcatcctcaaaccccgtaaaggaaataatgcatgacgaacatactgcagatccccttctcgaaatagcccgagtcacgttcaaagccacaagctccgactgatatcatctacgccaccaaagaccatttctgcgccggaacaggctagactgccactggagctgtccagcagaccaactcggttttggacacatgtgcctcgattattctttaatattcttgaaacctattaattaggaaatgccacgtcggtaccataaagggtgattaacgttttgtgcaaacgctggctgggtgttctcaaaccgctgggcaggggtgtggccaagccggaatcgcgaatatgacagaattccaatgctgattctcactgtctattatttctgtgccagtgaaatctacaatacctgtgagttcatatcccagactagatagatacagaggttgaatctaggtgctgggataccctcccggtgcactcaatagaaaagaatctaacaaattgatgcccgaccaagttattacaacgcgaaggtattttcaaagtaatcaataaatccattacagacccttggctacccgtaatttactttgcccgtcgaattaaagacgggaagttggagaagccatcctcctggcggattgtagcgagcgcgctcactggctgtacgtgtcctcggcctcttgaagagtcatgtccagactgttcttgttctgggtggcatcctgagcacaggttggcacagtgtcgatgataccaaaggcaagcgtgtcaacacctccctccaaagcccggagcacgtgtgcaatcggttgggtgaagggggtcaggctcagtaggccatgcttgccgatgacagtgttcaggagttcctgatgcaccatgacgaactattccagttgttagtgccgtccaatggggtgggctcgtttttgggaaatcaacatacggttctgaaagcattgcagatgccctgctgctcgctatcactgtaggcaggggggctctgtctcttctttccaacagtctggttcaaaatattagcaccttctctccaacgagacacactggcatattcatgacgaaccttgacagagcgcttgtttccaagtatttggccagggtccgcaacaatctctccaatgtcatcaacacactgctctgggtctgcaacatccaaacattcctggcgcgcccgaagagcgcgcttatctcctaggatctcactggggtcctccacgatttctccgaggtcttcaacacacttctcggggttctcaacatccaagcattcctgacgagctttgagagaccgcctggatttaccaccgttcatggaagtgatatcatcagtgactatctggattatatccttaaagtcgttgatcaattgctaaggaagaagtaagcacgaatggccttataccagcagcccttcgggacacatatacgggactgcgtaacatacagggccagtgctgaagaagtttgtgatggatatgctcttggcgatatcgttggtttccgatgacttctgggtgatctggtcgatattggcggtcatttgcgaagcactgacctgggcagaggcagaggcagccagacccagaagtgggaaaatggacttgaagtgcattctgacggtgtttatcaagggtctggtgaatcaaatgaagagactgaatcttggaggttggtgtcttcctcagaggccggatacttggggctttatatagttcttcgctgccataatttccaataccctccctctttaccctactcaacaaactgacatgagcaaacccacaatttccatcgctcgaagagatgcaaagctattgaccctgctaatgtgcggtgatgcattcgagccgctgtatatggaaagaactctgggcgatcatcgccatgaagccagacccagcgaagaggaccagcaaccatgttaacaaattggagaaagagtgctccagagctgaggctgatcatcaccgtctggtcctccctgaccagtgcatattgaaaaaggttcctgcagccgatcattgttccagcggagattaacctcgtggagctgccgcaatatgcaggcctcactggccatggcgaggcttggcctggcggggcatgaagatggttgggtctgccctgtccaccactccacatgagtcaaagcccatttgggatgtgatggcaatgcttcagtgttgtctcgtgggccctgcggagcggctatcacgtcccggtgttcctagtggcgtagatccagttcggcggcacggcgtgccttgatttttgcagtgatcgactgccaccgtatattcaagctccacgttgccttcggtcatggcattagtttactggataatatagaacgcttctttgatcatcccaccacagtcgatgtccacttcagctcgccgccacgggctggtagttcatattcctaaatatttggccatcggggtccaactcgtgtagctggctgtatcatgggggcgttatggacgtattgggcgattgttgggacgtaatcttttcaaacgctggttcacaccgcttgtattctctggggtacaattagggcttcaattcgaacagcaacggcactgccagtggagctgaatccgaccaacttaaatatatggagatcaatcagtggatgaaattatgcatggcctttccttcgctcctgtactgtgctggcaagcggagagtcgagatacaagttgagcatgacgtattgatatttatgaggagaagagtaaataagccatttatttgcattaacatactaatttccatgacggatgagagtaccccgaagcaaccgacggtggactaaaaggtagccagcttatccctcacgttgatcttagtcttgtttatctcgagatcatcgcggaacttgactccgttctggaatacgatggcgatgtccgacccgccaaataggaagtacgagattttatcccctttctgcacgcagtattccttctggacgctcatcgccacggacgagacctgggccattctgattagcaggactgcaaccttgccatggacgacagtgtcgatgatgatcaggcctcgagtctggcaccactggtagcccgcatcgtctggggcatccagcgatcgaaactcaaccttctttttgtggtgccttcgggatatctcggtctcctcacgagcgaggccccggtcagccgctagccttgcaccatctcgtttcttggttacttagaggtacacctgatcttgaatgtgcttcacttggattaccttgccgtttacaggagcgtgctggcggcggtagtcctgggacaagagaaacgtgtgcatcaggctgccattgtcgaaatccgggcctaggcgctgaagcagctcgctaacaggccacttgattcctttgctgtaatagcttggttctcaattctgacgagtgttctcctcggtgtcccatgaaccacggaaaaatggtgtcagcggcgtgcacaatgagcgaattgttatcaaccccagctatcggacgggttgatgcccgcccacgtacgcgagaagaactcattgaatgaaccacattcccggctgggcggtttatggtaaagcttgatatccttactatagataggcttgttgtaaaagggctccacatgggcagcagactccggagtattcatccagtgtcgaatctctcgtgccaaccccacgagccagtaggaatccacgacaggtccgtgttcgatgtctcgggcagcaatggcgtctggaggtttcggacagacggatgccctgaacgccgagtaaaatcaaataatactctttccatatagtttcttaatcgcataaaccggagttgttccgctgccattaatgactatttgatattagaaggtcttttattttattatttggaatgtgtaagcagccgacgcgggacgagcctcccgcagtgccaagtccgacggccactcagggcgcgccagtggggctgccgtattcggaaaggcaccacaaacaggaggtggggggcactctccaccactcagtcctcattcctgtccactgccagctcctgaatggcacgggtcggtgcggagtccaggcggcaggtcgcagaaggtcaacatccgagaccacaagtaacccgagaagccagaggatgttccccgcgtcggatatatatttccaccacatcaattaaccacaatacaaccacgttccaaatgacacagatacctccgctcaacatcgcccagtcttcccagagtgtcaatgtccatgtgatagacacgacggtgaagatcgatggccccaccgatttcttcctcaagcctcgggtgggcaacatggatcgcctagttgcaaacgcattcacgtttttaatcgagcatcccaccaccaaacagaaagtcgtctttgatctcggagtccgaaaagatgccaacgaactgtcgagccctttctggaagggctttcgggtgaactttgttatcgatgtcgaaaaggacgtcgcagacatattgcaggacaacaatatcgacctcacctcgattgatgccataatttggaggtgcgcagatactctgaccggctgtttacctttctaactatgaaaagtcatcgccacgcggaccacaccggggacccgtcaactttccccccgtgcgtcgacttgatttttgggcctggggcgccagccgccagactcccaggatatcctacgaaccaaaagagctcgctcttcgaggccgactaccagggcaggaagctggtagaaattacacaggataaattcgatctgcaaatcggtgaattccgagcctttgattactttggcgatggctctttctacctcctcgatgtccctggtcacgacatcggccacgtttgtggcctcgccaggacgactgctaacggcacgcaaacctccgaagacgacagcttcgttctcatgggtgccgacacttgccatcacgcgggtcaacttcgtccttcagagttccagccgctaccatcggagatccatccgcacccgaaggactcggaggccatgccggcgccattcgccagtacctgcttgcagaagatacaccccaagggacagttatatcacagttgtccgttttacgaagtgggcgtcttagagaatggcttcagtatgtcggagtcgcctgaagtcaccgcgcagagcatcgaaaaaatgttgccattcgacgccgcacctaatgtgctgcttatccttgcacacgacgtaactctacaggacaccgttaatcttttcccagccatggttaacggttgggaagacaccgcgttaaaggacgaaaccaggtggcggttcttgcgagattggagcactgctttcgaatgatggacgagatgtatacatattgtcttggatggtaaattcaggctgatagtggataattatccgtgattgaatgtggcttatatgttgttctaccagtatgacgaagcagagttgaataagggatgtttggtgcaccaaatattagagagcaggaactggcaacacattgttaaccctgcgaggctgatctaattatgattaaagataacgtcgttttggtagcaacaaaaagcagttcctttttgctcaagattcccagttcaaaccattcgcagatccatgacctcaaatcgccgactatcgctgctcaaacgtaaactggacctgagggacatctgagctatcaggtggcatgccgaatgtaatattccagaattcaaaattactgccaaatatcagcaaacagtgtttaagaaaaagaagtggatacttactgaatagcctcgcaagaacctcctagcaggccacagaacgatatctggggaatcggatcgacagtgccaccaacgacttcaatcttcagaccatccacatcgtcgaaaccagtaatatctctcttttgaccgagcgggttggttgcgagagcgaacgtgaatgtacttgaagagttcccaagcgggtaggtgaggttcagggtatatggagcaacatcggctttcaatgcagtctctgtgggatacaggctgaagtatccaatggactcgtcagatcttgcccactgaacgacagaagggctgaaccaggagtaggagaaatatccagacatcgagtactaaggacatctccgggttgagatccgctctggtgaccggtctccaagtcagccgcacccgtagtcgggctcctttctcgagttgagacattctcaagctcaatgtcaaatatattgcgagatgttgcagtatatcgggagtgatctttgaccggagaggtggggatggctgttgctacagcaagaggtttggagggtgtgggaggtgaaagtggaaggggaataggatggagctgaggcccggaggacacattgtataacgtccagccggatgatgacgaggcgcgcgccggaggtttaaaaggcggtggagggttgtaaaaattaatgttatcaaggtcaatatacatgacttctcaaggtttccagagggattggtaggaagatttccgagcggcttagcgcagcgggaaactgatgcgggaacaaagtaatgaaggacaacttgctggaactcgaacacaaaagcaagcatgtgtcctttatagataaaagaacagaatcatcggaagtatcacgatatcagagcaaaaccggcgctgtcgaacaagaattcgaaaacatggaagtcggtccccacgcgtaggccggaagtggcgtcaccctgccatatccggaaccaatagggaaatacacgagatagataggcagaaagcaagagatcacacgacatcagacacgcagtctgtggaaccgtcgcacttccgcggcagaaacgcacgttgcggtcgaagaccgaatgtaacgtctcccaggccagcctgccaatcgttgaaagcgttgcgttgggaggagtgttggcgatacgtggaacgggtctgccacgtcgttctccggacaatgtaggacaattaggtacatgaggcatttctgctattggcgtacgggcttttctgtcacgggcagggaatgaggaacactgccaccatctaacctcttgagatgcaaacgggcccagcgcgcagatggggaccggccgtcgaataacgctgagttggcccaaccggaatcttcatggggactgtgcacccaggatagtaggtctactgcagtgatcatctcgtgtcttccagtaggactggcgcgcccacgactcgacatcagccagcacagtagcggaatggcctggcgccgcggacgcagccagtcggggtcgccgatggaaggggaaacgagggggaggggggctgagggctcatttccgatgtgacagaaatcaggaggccagtgggccgcgcgatccgtgcaaaatatggcagcggcgagggcagtagtggacgaaagagggagggagcattgaagcgacgcaccggacgtctttatagttgtcagggagcagcgaaggcggtgtgaggcggcagttccgtttcggggatggcgttcggcactaaaccggatatgagacgcactaaaccacgtaggggccgagggagacgggcgctaaacctgaacgaggggactgccgaaaacggccgccctctggtaaatgcgaattgtccgagcaactaattaggatacctcaagtctagctactgagacggtccctgcaggcagttctagaaggtgacttctagatctagcgactatttactacttatttcctttatggtttcaagtactacttcagtaatccttctgcatactagtttaattctctagtttcaaccactagagcgctccctagcagatattctggcctatctaggatctatttggaagtaggttcgaataggaagtctaggtatcagggatataatctagttctaggtggggcctagatctagcagcggtatttaattggtatattaaatatctgaagaggaggatcccctacctgtatccagcactagcctgtatttttctggatttttttcttttttttcttgctggctttctaggcgacctagatactccaagcagtattcctattgatttaattatttaaatttaaattttgatatttatctttaaattttaaataaatagatcagtaatattgggcggaatcaatctactagctggtctgtgcagcctggttttctagaatttacccttcccaaaaattctattggtttagtagttccctgcaaaaattactatttaaaattatcagctttaaagctgttcttttaaattcccccttgttaaaatatcctgtattacccctactgtatttgaaagaggaggaatatatatatctttactatctacctgcctgcctgcctgctagttctattactttaaatctatttcttttaggtttctagtattattctagctctaggattatggattctaccctgcccccatacctagtattccatgaatcctataggtttattgcatgtcagatccatcaaactgccctacatcctaccaggatccttgatcatgtgactcaggatcaccagggtgaatctatatttctagaaaatctagaccttttacccctagagattattcatcaagaaattcaggcatggcagccagtttaacctctgaaaggtcttctaccacctaggaatgggtttcaatgttctatctgcagtcatattcgacttacagtgccgaccgctatcgccttccatatcgaacaacagatagaagctcttttgaaccctaatcacatgatacgctagtccatatttggttaagttatatttcaatatctgtttcaagtctgactcgtatgacttggaacaagtaaattacgaacttgggtatctgtacatttagtagtacagatccaaaacatcaggccaaccattaaacaggtatcatctaccgcacgggactctgagtaaattaatcgtatctttcttgcatcgtccgtccacaggatagatacattcaggcttcggttacaccaatgatttcgccgtagccttcttacgttgacgctgtgatataatgatccagtttaagtcatacagaagataaactgcagtgatgtagccattttccccgaattccattacaggcatgcaattcgtgcagacttattatttgaaaaatctagcaaatttcttaatagcccgccgtgccgtactagcgttgagatgtgcggccttctcattgtttggcagtgctcgctggtacatctctgcctctttcagcttcccttgatcggagtagagaacgccaaggttgttcactgtatccagagtggacgtatgatctggaccgagggccttctcctagcctaccagtgctcgctgatacatctcttctgcctctttcagcttcccttgatttttatagagaacgccaaggttgttcactatatccagagtggacgtatgatttagaccgagggcctcctcctggcctaccagtgctcgctggtacatctcttctgcctctttcagcttcccttgatcagagaagagatttccaaggttattgactgtgacgagagtggacgtatgatttggaccgagggccttctcgtagcctgctagtgctcgctggtacatctcttctgcctccttaagcttgccctgatcagagtaaagatcccctaaaccatggaatgcccccataactcaatattgtcaactgaccaatctagatgacatacataattggcgtgtagaagaagccgttgctaaagctctaaatagtccctattacttacactcggcacagagtatccaacagatatcagtgccagctcattaagctgaatccaatttacatttttgtttgtgttggcaatatgaaggcaccaatcctgtaccactgggtgcatcgcatagcttccttcttgttgcttactctcaagaagagagaatccgatgagagacttcataccgattttgaactcgagtccgcttgatatagcctttttgagccagtccgggacgtttgagctgtgacggccactcttcaccaactcgtaccagatatcacgattatcgaaatgagcaagtagcaatagaaggtctactaagtttgggtcacgcttctggatctcaagatataagatcatccatatttgcagcatattgccttactggtactgacgtccgggatccgattgcagctgtagctcagactaagattcttgatagaactgcaagtactcagtgatgctggttccagtttcacgcataaacgccccggccagaacaatggctaatagcagtctatacagacgattagcaagagcaaggacatctacatatattagcatatcagtaacatctattcatcaagtgccacagtacctaaattgctatcaagtttactagtagtgtttcttaatgatacaccactgctttgtaggagtaattaaattgagctataagagtcaagtctacgaactgggaaaggctcccctagctcagtcagcccttaaagtcgagaagtgataaggatagagccatgatctactttagggaaaaattccgcaatatcatatccatcactaatagagctatcgaaggggtggtatcgatcgacattatcaaaaatgattagccagcgcgagttaccatccaatccaagccaccgcaacatttatctggctcgttgctctacatcctcgtcattgattatctcccggtcccagtactgttctggtaatcggttcaaggcaaagctcaacgattgcaacagcgcatcgcagtccttgccatacagccagaatatcgccataaaatcatctctgtaatctcgcgcgaagcgaatcgctagctacatctttcctattccgccaagcccgtgaagaattgcaacttttcgcgacagtgaatctgtcggttgtaaatactgccacagattgtctatctcctcttgccgtcccacaaaatttgcaatcacagacaatgcggtcaggtctagagggacattaaagcggtagactgcacacagaaatttttatttagtcatggattcgaactaggcaaggagtgatacagattgaaacttagaaacccttactatgatctgctagagtgtctcgtgctgttggagtagttttaacctgatcgatcggaaccaccaagacaagttctttagcgtaggctgctgccgccattgccgcatatccttgccattccttatttttgtgtgagtccgcatagtcacaaataccccggataactaaacaaggaaagtcattcataagccccgccgcttccatttccacacagtacactcccaggtcctgagccagctagtctcgccgtctaccgtctttcactacctgatttgcagacgcaatcagcccatagtgaaacactggttctttatggtctcgtggacgccttggcttcaatttggaccgatcacaaccgatacatatatcagatactccgtggtcatagtctatttcgtataaaaggtcctcttttattagtcgtgtaaaatttgcagctatacgcagcgtcattttagctcggacctcagaaatgaattcaagaattcgactttcttctgtgaagtggtgggcttgaagtgtagcgagggcagtcagcaggaccttggggggccggttaagcatccctgtccgctagaattgaccaccacttaatactttaccaaggtcgtattagatcacacctccagatgtgtctgttggttggctcaccacgatatcgccaagtcgaacgtctgcgttgccgtttggtactcctccaccaataccgaccatcagtccgaaccggatagagtggaaactcgagagcaattgcatcgcgaccgttgcagctgatacgatgccatatgcgccacttggcaaacaggcaataacgatgttgtggtccccgatatttcccagaatatacgtattttgatccgtcggcgggcgaggcagacttgggtgtattgcgtccaacatcagctttgcggccgccatctccaggggtaaagcgcatatccacccgaccgtgtaatcgtcatgggatagagtggccctggctgccataatagaatatcaaatggttggcttttagagactgagtacgctattattagttcataagaactgcgagacaaaaatgatatcgaaccccagtctcacgaatggatggatgccgtggttgttgagaggaggggcggggtcggcccccagcgagactgaggcgaagtactatcacgaccaatcattcttatacagtggagaagaaattattaacagattgcctgtttgaggaatgccatgtttgctcattttacatcgaatattccagtcacataggcttctagacccctgtaactaccatacgagtatcataaaattcgtacgatttattcctggttcggtataaaccagataatttacacactatctatatctagattagcgcatcctatatacaagttatgtgaccttcctcctattgagaacccagtaatggtctttggaatattaatcacatgataccctaatctagatatagttatagctgtatttgaggttgtcgttccaatgttgaatggtacatataatgccaaatgatagaatacaaaattgaggaagtcgtgtaggtattattacagccccaagaatactcacagcccccacgatatttcccccaaaacgactgtctccattccagcaccaacaacgccccagcccgcttcaatatggcacgtaatctcaaaaattggcaacgtcaatccattgttcatatgacacgcagcaggaagaagctgaccatttcacaaatggccaaggtggccaagtgtagtgagcgatctgtcactaacatacgcaggaacttgcggctcttcggcagccctcgatccccatcagtccctgccggtcagccatcaagcatcacttctgtgatgctagatgccctttgtgatcacctcgccgaaaagcccggtttatatattgatgagatggccatttttttatgggatgagttcaacattttgccatccccatcgagcgtcaaacgtgctcttacgcgagctggctagacgaggaagaaaattcaacagaaagcgagagaacagaacactcaactaagagatttctaccagcacaaactgtccgaatatcgttcttaccacctggtcttcgttgatgaatcgggatgtgataaacgggtggggtaccggcgaactggatggtcaccactgggcgtgacaccagtccaagtatctaagtttcaccgcggtcaacgctatcagatcctgccagcctacacacaggatggtgtcatcctgtctcgtatttttaaggggtcaactgatgcagtgttcttcgaatcgtttataaagcaacttctccagcactgtggaaagtggccggaaccgaaatcggtgcttgtaatggataatgcctctttccaccactcggaccgaatcaagcagttgtgttctgatgcaggtgtcaaattgttgtacttgccgccttactcaccagatttcaaccccatcgaggaattctttgccgagctgaaggcttatataaaaaagtcctggtcggcgtacgaagcgaatcccgagcaaggttttcatatcttccttcggcggtgtgttcatgatgttggtgcgaaacaacagagcgcagagggtcattttcgacatgcaggcataacaatagaaagggcctaagtgattctcactgtgaaaaatgtgtgcatatgttacaagtcagatagtgtgacaatacattagactaaacggtctctgtcgagaacagcgcttttccatttcgagaaaaagaccattgcgtagaatgcgcgagacaattaaccatacacataagaagaatgtgttatatactgtagtaaccaatgtatattccgttgttgtatacgccaatatctaactgcaactaccaatgtccgaagctacagtagaattcgaaatcagctttaacgccaaactcttttactctctatccccctgccccacctagatcgcgctatacctaatttgattagaagtggacctatccgattatttccaatgtacctttaggcagccgtcagaaataccgttattgaaatgtccggccaccgcttaccagatcctccccgaccctggcccagcttcccctctacctctgatgtcatcgccacaggttttaatactaatgacgagttcactttaaccaaacacgaattcgacatcctctaaacgagatatatacactgttacatccataaagccacaccgctataaatttcaaaattaatttctccttgaattaacatggtgtggcagagaaacagttactatccccatttttgtagtttaataatttttttgggggggggttttgaattaagctacatagttgtagaaataatcgattgtcgagcgagcacaagccacactgttcctaagacggccgatctcatcttcagcatgaatgggatcagcttccctcctaacattagagacttctgcgtcctcttttatcgtcgtattagctcttcggatgttttgacagctttcctgaactctgtagaggcctaattccagtgctgcgttttgaagacattccgcggatgatatcaactgacgaatgtctctatttagtctgataataaaaatcgtcagaacagtgattaaccttgacaagaaactccgggtatgtatttgcaattgactagcccaagatatattgtaccatatgaatcagggttaaggcttacagagcatgtctacctctgatgccatcgccacagactcatactcatacaacactaccctctttccactcctttgtacgataaattatcttcggtggtttattctgtgattgaaatactatcaggtatcgctgagatccataaaaaggacattgttctatttcagccgtcaccgagtatattcgcgataaatcatggaaaccgagcagctcgagcagaaccttgatatggccattttctcccaactactagagatggaccacgaagaagatcggctgaccagctcgatcgcattttatacgtttatcgaacgggcaaacaatactattgacgatatggaacatgctctgtaagccttaaccctgattcatatggtacaatatatcttgggctagtcaattgcaaatacatacccggagtttcttgtcaaggttaatcactgttctgacgatttttattatcagactaaatagagacattcgtcagttgatatcatccgcggaatgtcttcaaaacgcagcactggaattaggcctctacagagttcaggaaagctgtcaaaacatccgaagagctaatacgacgataaaagaggacgcagaagtctctaatgttaggagggaagctgatcccattcatgctgaagatgagatcggccgtcttaggaacagtgtggcttgtgctcgctcgacaatcgattatttctacaactatgtagcttaattcaaaacccccccccaaaaaaattattaaactacaaaaatggggatagtaactgtttctctgccacaccatgttaattcaaggagaaattaattttgaaatttatagcggtgtggctttatggatgtaacagtgtatatatctcgtttagaggatgtcgaattcgtgtttggttaaagtgaactcgtcattagtattaaaacctgtggcgatgacatcagagtcagaggggaagctgggccagggtcggggaggatctggtaagcggtggccggacatttcaataacggtatttctgacggctgcctaaaggtacattggaaataatcggataggtccacttctaatcaaattaggtatagcgcgatctaggtggggcaggggaacagagagtaaaagagtttggcgttaaagctgatttcgaattatactgtaatatgtatcggctgtacccatcagagctgggagagaccttgactattgcgcggacgttgtggttgatactattacgatataaattattgtgttgtgtgccgagcgggagctaacgccagacgaatggcggacctacccacgggggctcctgagccccttgccaccataaccacgcgaagaggcatagggatcgttgtaacagaaaaccttgcactaacgaccacggtccggaccaggagatatgtatgagtggaaagcaagcagacctacgcggccctggaacccgtagaactgactaatactggaactagcactagacgagtgataactagagagatttagcagattattgtacacctgtaatatactattaaggagtaaaccacacttattcacaccactgggactgaactaagagaagtgaaagataactagaacgagctctaaacttagaatgagaagctataggaagagattacagcgctacggttatagataaaggagaggaacgctctaaccttgatataattataggcggctgttacggctaatacagataatctgtaaccccgggagacctggcgataaactaataaagataagaactatatctgaatcagtacctagcgatctattactaaagtattaggcgtagataataacagagatacgttcggccgctatctccctaccctaactgcgaacgcctatattaggatagtactatcgaagacactatctacctaggatatataggttacagggattagtactactaaaattggatatataatccgatttaaaaactaagtattggccgaaacggcctacactaatactgagtggctgaccgagctaggtaatgatactagactagtaaagctacgtttcaaagtcgctgtttactatatcctaacctttagattagaccttgaaaataggaaaaccaaagccattaaaaagattgtaaataagaataatcttaccgactatagatttcgaattgaagatatagtctagctaaagaaaagagataaagaactaggaatatttgccttaataggtatctggtttaacttactagaggtagtagaatagatactagacaatagcctattaattaattaatagtatattagaagagtagaaaagtatgagattaaaaagaaataatacttctaatactaaggattcggctatctagtatagttgtataaagagataccctaatatagccactgtagcggctaatataagcgagaaagatatcccctaggtatcagagcacactacttggaatatagtagggaatatctgactagagacttgctatacctaatgctagctacagtacccctattgtaatattagataataaccttagaattctataactaaatactatgaaatcgagagtaggtatagaagctcttattaacgactatcagagccagaaactagatatactccttatctaagaactgtcgattactacctaccgaatatatataaaccacagtgtatagtaactctattaacctatagtagaaagcgatttggtttaataccgaagccttatctatattaattataaactcttaacctcctcttactaataagtaagatacaattacccagatctaatagtaattaaagtttagatagccaactcctaaatcctgatcttctcagtctatattctgcctatactaatatatacgcctaatagagtatcggcggagacgaccttatcggtaatctataatactatttaaaatgttatataagataatagtagaacctttagccttattttagctagagatttcaattactaccacctagtataggggagcaactatatttaaccttaatttattgaggacgctagggaattaattaatttcttttataattatagcctttagagctacctcccttagggaactgtaaccttctagttattaagctacctaggaagaagttctataattaactagatagtaataaacagactagacctactctttaaatactacctctactataataactatagtttagattactaaggcacttatttagaatggtacctctaagtgcaacgcaaccctactagtaagataagaaaggtatataaccgagcggactaggagaagattggaaaggagatctaggaacttttcgagtaatctagggagttagacttagccgaggcgctagatacagttatagagagacttataagtacgatagtaaatatagtcgataagtatatatctaatataagaccttccctatactctaaatagtagtttactactaaccttaaagcctaataaaaagatataaaccgcctataacgtaagtggcaagagagctatactaagatcagataagctaatatccacactatagctatattcgaagatatatactagatatagcgggtatagacttagactattaagaaggctaagatatcctattaaaaatagttcctagataaagtaggagaagggaaattatagaaggtagtaacttatataaaactacgagattcctagggctatattcctacccttaaggttggcgatatagagctagttaataatatagagaaagcttaggtatttatagactcgtttttcctatctatagtatctatataagaggaagtacctacctataccctaactgagatctagtggtatctaatctctgagattaaaatctatcgatctcttagggctgctaaaggtataatagtactaggtaaggacagtctacttacgttaatctagaaatatctctagaaatatctcggaaatattattataaggatttttatattatcgattgaactaggatattacctacagtaatagagaagtgcgcgaattatagtcttatagaagcctaggaaagtagactacttgttacctagagcttaccgcctaatctcgctacttaatatacttagtaagttattagaagcagtaatagcttagtggctatccttcttcgtagagtactatagtcttctaccggatacttagtttagaggatatctaggacgaataaccgagtaagccctcctaatacttactaatataatcgaccagatatgatatagatagaaggtcgtcttattaatagcctttaacctaaagggagcctttaatagggtaaataagataagcctagatatctacctctagtctaagggtatcctatcggtagcctagaagtagattgcgagctttataagtaggcgttaggtaagtattaggttcgacgactactagactaaggtagtatcgctagataaggctaggcttatataaggctctctactcttacttatcctctttacattctttaactatgacctagtcgactagccggttgattttcacagtagggtatctacctttatcgataactacttctactagcgagttagctagagcgctaaaaagaacctagctaaaatctagtctaaagatataccctagattgaagcctaggcctagcgaactaggtcctacttcgctatagagaagactgaactcatttatattacttataagaggaaagaatagagctagggctagcttattataaatagtaatactattaaactatctataaccgctaaactcctaggtataatctttaactataagctatagtagaaggaatatatataataagctgttaaacgagctactaaggttaatatcgcgcttaggggcttataataactctatctagagtaaatataatagctttacgaagcgtacattatactagttatcgactatatattaactatctagtataatctatttcgagataagacctatctacaatacctctatactatataataagtggcacttatctatatcctatctatatttcgaacggtagtaataactatacttaatatagagatatatatactactaatgtacctttatctacactactgtatatagaatactattactaaactatataccctaccttaaaaatatcctatatagaataccctaaattaagcctagagaagatataataatcatagatcgtttacctggttcctactattagaagccttaaaaaccataaacttagagagactataggaaatcgaaataattaatctaaccctactactaccttagcgaaaagaagccttcttagaaatcgagattaaatcagatagagagattgtaatagaaagggccgaggtagtatagttaaccgcagatattgtagtatatttagataccttaggaagagaaggctatctaggtaccgcagtagccgcgctaaataacttactagaaataatcgatagtatataagtataggttagacctatagattagtggttagtatataccgctaagctaattagggtcctatatgctattaatattattaataaggtcgctctctaatactagagaatatcctacttgcgggtaggatctactactatccttagtaatagtaagtcggccctataagtaatctagaatcttaggaataagttaggataatagattatctatactattctataagcagttaggaatactaagacctatagtatatcgatacgactatagtagatacccggatactacgaagtactagggaataacgctaccgatttactagctaaggaggcagctgtactaggcaaaacttacccgttttactatttactattatataagagagtatatattaggtaagggatctatgcccaatagaagaataaatagaacggctcgagtactagcgtatatctatatcagatcgacgatacactaccggctaaatatactagacggctctacggctctctacctagaaatcgagtatacttatttatacagttacgaaccggatactactagttattaatatatataaagactttctgatttcgagataacgatatatatatctatagtaaacgggaaagcgtttactatatattgttagattacctataattaagagaactgaggagagagctgtaaattaaggttagcgatacttttaatagtatatcgatactattaagtagactaggagaagaaggaagaggtaagattaacagtatattataaaccaagatagtggaggctgtcttggattttgctgaagtatcgtaacggtttcaaagccgcgcgctataagggcagtataaacacaacgatggtatagaggctacggtaggcctcggcaaggctctaagttcgcttaggaagtggtacacgatacatgtatataggaagatatatatagtagcggtaggctgcatatcgtttcgacgaggggtcagcgtaaatgaattacacacacatacacacacactgtaaattggcacttattctcttatctccctcaagtaaaccagcttactcacccccttggctcgagtggattcatgccttaggcaccaatgactttaacatgcttttggccgtttggtaggctgacgttcagaggtcctttagtactggtgaaagttctccggtcccctccgagggctcggaatggaggtgattcttacgagcaggttgaaatcatttcttgccagagacctggggggtgtgagggtattatgaaatgcacggatctgcgctttaggtggggaaggggctctcaactagccaatcttttcagtcctgctgactgcaatcacgtcgtatacctttgctcgccctctttaaaacgcctggtttattaaacgttcagtcaaaatttcaccgcccgctaatttccctcatgttagaagttacgttgaatgcttgttcctttaatggttttaccaaccaagctatagcaaattttcacatttaatatacaacagcggtcaagatgaccctatatatacagcccgtttattgtagtattcaagctaggagatttgccttgcttgggttcttgttgcagtaagtaacgcacccagtcagatttttgacagcgcctacagtgctggcgagtgaatcggggtgtagcgcaatccattatgcacaagtatctgtaactatcctgtctactattattaatcacgtcattcgcccagggctgaccagagccatgacaacaggagttccgttagcacgcttcagcccgtaacacgattggctctcggtggcaagtcagagtcccccccccccagttagttggcaattccggtggttgtaagctcttgcaggcagaacgctacgggtaattactaatgctaacagataagatgttggatcggaaaaacttctatccggggtttctttataatcctgtgcagcccttgaatggagtcgtccctctgcaataatcccacatttattgctatctatctcactgaaatggaattatcaatacgcccaatagcccatgtatgtttattcatagtttgttggataccatttactgacatgtctacgcaaagccacaaagtcgtgaccctcatggattttttccactagatggaaaggaccttaattccgtcacagatgaggctctggcaactcttctcacatcttctcctatcctccaccagctaggtggaacgacagttgtgcggctttcagagaccttaatcatgaagggtggcgggagtgtcatggctagtgaaacggaaatgcttcgtcttattgcttccagaaccaccattcgagccccaagagtctatcgctcatttcaggtcaaagatgatacacaatattttggtacatctgggtatattgtgatggattttatcccaggtcaaccactggataagagctggaacagcctatcccgtgacactcaagggaaaatcgctgcgcaggttgctgaaataatccaagagatgcagtccattgagcttccacagcctggtcccactggtggaggaccatgtcggggtcggttcttcacagattatagtgcggggccttttatggacactgctgaaatggaagcttggtttaaccacaagctagatatctgcaaaagtgtccatcaagccccaaaagacattccgccattccattttaccaagtttgtccttacacacaacgacatcagtcctcgaaacctgatcttagaccaacatgaacaagtgtggttgattgactgggcatattccggtgcatatcctcctgtctttgaaagcgcagcaatttcaatacagccatttttcactgatttcaatgaagcggtgttatccctcattccacgtcaccctgaggaggaaatgcaacttgattctattgcatatggattaaccaccgcggcattggcctaagggaggcttaaatggaagcggactacacccgtcacggcgaatcctattagaattagctggttggaggaaatttagttggacaacaatgacattaaaaatttgctcaatgctagaattcctcttagttgttcgcctcttaaggtcgcatatttaaaacacgtgcaattgctaattagtccacctaaaaaacaacagacttaaagtatctcattcgccccctttttccctcggggacaacaccacctagaagtggagataggagtcagggtcaatgatgtctagtttgttcccagaatagcgacactcaggccaagcaatgctggaagaacacagtactgaaattattgttagaatgaaaggcattggtcgtgaattgaacaggccatacgtgaaactatctcgggcatccgcatcaaagcaagcgaatatcatcaatgtattcaccgggacattgtggtaaccaaatgggcatagtagtgtatttccatcgccaaatgggacaataatgattcccgtgtggtacatacgcacagccgaatggcgggcaggaagatggaaagctgcttgctttagttcgtgagggatcctgaaacggcgcccagaaatgaagttgcttggaaactcatcagcagacccgatcgagccgcctacgagccgcctattcatttgtgggaaagatacaagaaaatatgtaacgaaaatctgcaacaagagatacaaatgaacggactaactaactcaagcatcaaaaataccgaaaatgaagtgaagaaaaaagaacgccgttcaacacgaaagttcctacatcccgtatgccatacccctgggagttacttgttagtccatcctcatgctcccgggattcctgctcaggaggccaagaaccgatattaagcgcatgtttttttttatcggttgaaatattttccggcggatggccccactgatcgccccaccggcacaaagcgcgtctgggaactatgctgtatgactcagaaacttatccgcatgctaagtgctttactaccatgcctaattttcacggtaaagagttcaataattcagctgtatgtaatgacagtttcttgtgggtggtgaagcctggctcaaattcaagagaagggagaccgcaaaataaaggactgtgggtaacaaagaaaagtgtgcaagatagtaaggaatggacctggtggcccgaaagaaaacaaacaagaaggaaaaatatcgggaaagtgggaaagagaaaaggtgaggctcattggtagtaagccccctggtcaaggggaagtagtgtctgatctggccacagcttgagaattcctgcttttgccgccgcaacctgggatgcgttaccgacaaactgaagttggtataaaagattaatctgatcagtagtccagcatctgcacccaactcccattgcatcgaattcgtatttatgacgcccatatcgagtaaattccccccaaacttgccccactgacagtccaggggcaacatcgagaataaattgggcctaggcatcggtagatatttcgtaaggcaattctgagatgatgaggttggccttagagcctccccgaaggaccgagctcggaacagtgtagcttagctggcaatcgattcgaaccgagcttgcgggggataacgaaaggtagaggcaccagtgattagtaccccctgccttccgatgtagaacggcgaggatgcgcttcactggcatagccaatatttgagcctagtgactggcaggcacatagtgaacgggctgaaaaccagacatagctaacgaggcaagactaaaaagacaagttagaatgaccaaactaacaatgaaacaataatacagaactcacaggatttgagagaaattgtacaatctgtacaaattagatcttgcgggcgagagaacacagatggattgtgaaggaagttgaggaaaacgcgtccttttaataaccatagattcgaaatagaggcccatgttaattgtctaaataaaactagtatacgtcgtttcatgagacgcccattgccttacccatcgaggcgggtaaattggggatgtgcacagcatttgattgacactcgactcttgaggcccgcaccacagtgagaccagaaaatgggcagcgtgacgcccgcgctacagcacttacagaggactgattttggtattacttattttagaatgcaccacagcggcggcacgagagcgggccatcggcgtcgcgcgtttttggtactagcggggacgagtcgtggtccagcgctctcaagataatattacttttctatcacacgagtcgcttcaggacatgaatttgtgttactgactttgataaacgacgaattaacagcggatcaacagcgagtcagagaccatgcctacgcgggttttatttgaagagcgcccccgcaccatttttgacatgaatatcatctgttttgactttccttgttgtatgattggaaaggtacaaggaatgcatggtgaccctgttgaagttgtgctttatgcaccaagagtttctattggatctcagccttggatctaaggaacgaaaagactaaatccaggcggacagcttaaaatgaatctcttgactctgggctttatctgtagcattttaaagatgttaaggatacttatgaggctgcgtggctacttccaatagggtggaaagaatgtatctatagagcaaatatactgaattcaacttcagattatgagagactgagaacatcatggtggggttaaattgtaggtcacgtgctccattttgttgtgcccaaccccgcctcgccaagagaagtgtaagattcgtttcgattatctcgacccaaaaaaccgcagtcgagcaatacgttgtatgcgcattcagtagcggtactagtggctgttctatgaatggacccatggcctacctccgaccggctgcgaaaaagcctaaacaggatccttgcgacaaattgaggaactggctgccataggcagaatttccagcgaaggacgatgcgcctcacatgaggctatatcgaaacgttccggtggattttcttcggcctttccaaaaggaggtatggaacttgtattactaattcccttaatattatatgcagctaaccttggccagaaaatgaaaaccagtttgatataatttgcgaacggagcctccccgcgggaaccctacagtactcttacagctatcctcctacacgaagataatgcaaatatatctcttatcaatcataacgcaaatattctactagcgagcggtgactcgatagaatggagtggattaatagaaattctgaattcgtgtatctatatagtgacctagagtaaagagactatctaacagcctcctccgtgagatttagccactgtttaggtaagggaatgcctattattagagaaaaggatagtatacaatagttaaatagagtagatagaagcgctaccgtttcttaagaagcgaaatacagtaaaacaggtatctcagatatggtattaaaggatagaagggaataagaaaatatttctatatttacaaaatccggaggacctattaaatatagatagcgtaaatctatatatttttagttattaagatattggctaagttaacgaccaacgacttacgtgagtcatctggttagatttaggaaagcgagtatactgtctaatacccctggactaaatattacggatctgaactagtaagaagaagtcgcttatctagtgctacctactataggaaacctttagggcttagattcctacttaaggaagccctctcctagtctatgggaatcagtattatattaatagatcttatttcctaggaggcttactggatagatttagaagggaataattagggtcttcgttaaaggttatctgcacttatatattaaccgataaagttaaattgaaagataggctacttatatttaaatcggtcccgctgctaagacaatgtcttttctgtgcttcgtataagaagcctgctgccggctgtaagtaccttttagtttagggttcggccctagggtcggcttcgctattaggggaaatctaatctataggaaagaagagcttttatctttccagcttatctatgatatctgaaccaaatggccctaggtactattttgcaaatgattctagagcgatatcgaaattgcagtgtagagtattatatatatctaagaatctagaagctaattataagtaaaagcgataagcgaaatggtttatatatatactgaacacttttactaaatatatatttaataatatacagaatagagagatggtttaagtgtaaacttgcttagtttttcttatattaatcttcttttaaagaggtaataaatatagatttcgatttagttactttcgcccagtaccttaataaagtaaaggtcggggtaactagattcacccgttagctctatataaaactaattagcaaagaaacctaatagtaaaataagatatcaccgcttctaatatcccaaccgctctctatttataggcagttaattgcctctaccccctaagccgctctataccgaagctcctgaaggtaatcgggtcctcctttcgaaataaatcccattatcttattcactgattttggattaatactaaggcaatatataatatggcagagtgtacctaataagaaattctaataggatacaattaatttcgcctacttcacattatccgcacattttttcgcgaacgaagtataagcctcaatggttcggatgatatccgaattccgataatagatagctgatatcgaggaatcactgtctctaaggtaattttcgctttggaataatatatctaaaacggaaactcgttagggacatactacactaggccacttttctgcagaaggaatcctattgataaaagttcgaagaggctttctctacgtttcttctaactgaggagaacctgatagagaaggccttatataccgagtcactggacggttttaaggtataggggatcggagaagatgagataaggtgatttcgagtggaatctgagatcgcacaaggacatgctgtggaacataaggtatccattctctcagtatatgctgaagatgatgaatgtgtctctctaatacagcgacgtggtaggaagcgttactagattctatctcatggacgaagtcagtcatctaaggatgacagtacgatatagaatagatggatcagcctctagagagatggcgggggaagagagccatcaccaaaattattagcaaagattaattggccgtgataggggtatgggctctcagcccatacccctgtcacagccaatcaattgcggggcagtatctgcccaggacatgagcttacatgcaagctagttcgttttccctcaccaatttgtcctctggccattatagtgacccatgtcagtgaagcccgcgtatgcaaggctagcgaaaatggattcggtacacataaatggagtgacactagtgcatttattaagccgatgcatgaccgcagtactaatctgtcgtgagtagcttacatacacataccaatggcatgaaattagattccgggaccttagagtggcgatagtatggtctgcttgagcctactttcgagcttcgtatcgcgcctctccacccccccccccccccccccccccccccccccacacccgacaacccgcgcccnnnnnnnnnnnnnnnnnnnnnnnnnnnnnnnnnnnnnnnnnnnnnnnnnnnnnnnnnnnnnnnnnnnnnnnnnnnnnnnnnnnnnnnnnnnnnnnnnnnnnnnnnnnnnnnnnnnnnnnnnnnnnnnnnnnnnnnnnnnnnnnnnnnnnnnnnnnnnnnnnnnnnnnnnnnnnngagcttcgctaccccccccccccccccccccccccccccggcagcacatgtgagacagttttatctggaggcccagattcgaatggaaagtttatgcatgaaactacgagcgacgctatgcctataatgttgaaagaatagcctacctctaccttctctgttgattcggactctggtgtctctgccgaagactctgcgccgattcgcttgcgcgtgggttaccctttcttcctcgttgacaccgagttctaaccaaacaaaactgtgcgacgttggttttttcccaaggctcctgaacttatggatgccattgcccttcaagagcttggcgctcagtgaggtgttgaaatggacaaacgttggacggtctggtatgatgcctatcttggagaaattggcagccgccttacaaagctcgcttactgttgatcaaagcaaatataatataatttatggcttgctcttgtactgatcatcggaaaggcctcaatctaagataaataaaaaggtaaagtttgaaggagccgtttcacacaaaatgcttcggtatcgatcttgaagtattccccacacttgactattatggggcggtctcaagaaaatacgcaagccctgtgatgcttcagaagatgaagcgtcaaaatgccaagtcaacagtgccagcatcaggacagcaccataactaagatgttgtaaaatatccctcacgtaaacgcgtaagtcattctcgagagaaaatccttcgtcggatcttctacttctcaaatccgtgcaaatatctagcagcatcctagcatctgggctgggattttttgaggacgtagacgtccattcccagactgacggagattcaattctcaaagagagtattgctttcaaagcaatttctgctggcccatacaggaattggacaggaatcggggtggacttctagtgttagcatatcatcgtcaccagcgaaatatgtgggtactaaccatgacgaattatttggttcaatgacaaggtgcgatcaatggtgccttagacagtagaaataggcacctttataacctgctagacttgaaacaataaacatagctgatacttgagaccttccatctctattgatgatttcacctcatattattctacaccattcgatgcctgctgttcaactgaactcatgcactgcctttcttctgcatcattctggtctctttttccgaattggatacgatccctccgcgtatcagagggagagcaaagcagagagcacctagatcaaactgtccccattgcttctagcccgtatacgcgaaccgagccagctgtatatgagcctcaaaacaccgaatttgcacataacgccacaaagcctctacccatatgcatttcaaatcgaatagagagagcagcatggactccactttgtgagtttccctgcaaagtgcgagccttttatactgtcttcttacatttcaatttccagcaaaccgaccccgagccatctccatgaaacctgatgacaacacagatggtgaaattattaagcttcctgacgttgtatttgtcaaaggcaatgtttatttacgcgaaataggaacactattccaagatggagaagggagtaacaggtgcccaatgacataatgaggacccagcgtagaaagtaatgaatagcaaaatacgtctgctttgatacacctatataacctttatgattccctctcgttactagtagcatgacgacagcatcaagctttttacaccttggcctcatctttcagaaagcatttggaatcatggcaaggtcgacgccacatataatcaaagccatgttccgtttcatgctccttgcacaattccgttcttcacaattctggtcttcggctctcaaagctatactccgtttcatgctcctcgcgcaatttcaatcttcagctgtcatatcctttgccaaactcctacactattttcaggataaatgggggaatcttacaatttggattctgtatctgttcacgtactcgatttcaataagttcatttgacgagttgcatccgtccttgatgagattgatttcgcgccaccatatgttggcaaacgcacaacattccattgcaagaacaaagtcgaaatggtcaatatgggtagaggatgatgccgactcagaggatgacgctgaaactcttgattctcagttcaagagaaacgaaaacctctactggaagagacagaagcgaaaaggcctgcgaaaaattaaattcgagccaacccgaggaaatgtcgtcaccttctattacaaagggtacctaataggtcttcgtcgtgaggcaaagcctgggaccaccattattacagaagagtccgaggtcatctggctatactcgacagaccggagcattcttcaaagcctgcttagtgatgttcgtgacttacaaacattgaaagaccactgggtacaatattttcgtggcgaaacagcgaaagacgtttcctgctggtatcctatcgccaaagaacctcctcgatctccctccactctgatactggaaggagaagttctggcacatattgtgtccgatattaaaaactacctcgatccatcaaccgaaagattttataaaagaatcggcaaacctcaccgccgtggtttccttttatatggtcctcccggaacaggcaaatcaagtctatgtgcagttttggccggaaggttctatatgaacatttacacattgagtctgaacagttccaatctcacggaaagtggtctagtgaagctctttagggatctccctgatcacgcgatgatcgttctcgaggatatcgaccgggcctggggttctgtagagcaattcaaaacagacattccatcagggacggagtcacatgcacgtaccggtatctctctctctgccctcttgaacgtgatcgacgggaacggtgcaaaggaaaagcgtgttctctttatgactaccaaccatctggaaaatttggattctgctctgatacgacccggtcgaattgaccgtaccttttaccttggttacgcaacagcaatgatgatcaaaaaattattcatattattctatgagccattcggggttgacaaggatgaactttcagaattggcaagcaggttcgccagtgaggtcccaagcgagatcttcacggcagctgcaatccaaaactttttactgaatcataaagatgccccggagagggctgtttctagtgcagccgattgggtgaattctcgctcaaaggaatcttaggttcactaacgagccgtttcagagcgtctgtcgcactgtacggcgtttgcgggttggaatatcgctttccccatgctaagagagctgaaaaggggtgggggagagagatggaagaggggtggtggaaaatcactgcggctacagcgcatccgactgccatgtcaaggatcactagtcacatgagcagcttctacaggcaattttatgtgaaagatgtattttccgggttttcagcctacatgaaaagattacgaacctaggaaaagatctatactcgcacaacgactttagatctttacagacaagttactcatttccccaccatgaagcaagcaagtctcggtgaggctcatataaattccagggcaatatccattcatcctagcgctctttcccaaaaatcttcttaaaagtttccgtgtccaaatcgccattgaacagggtgctgttattcttcacagacccaccattgatcatgtggagctgggttttatcgggatgcttgtctctagcgttgccgttgaatacaactgatcctttatctatttccatcccaaataagacatgtgcggaccgccttgaagaagcatctatggggagggggaatttatattagatttttctcaagtgagggcagcaaggagtgagacaacatcgcaatacctcgacttttttcctcctcgcctagaggaacgagatctgaggattgtttctatgatcagacaagtggttagctagaacatggtattttcttggtcacaactcaccttgttttccgaagacagggccatatcctccttacggtgctgagaagtgactggagggccacttctagaattttcttcattcttgtttggatccatatcaacaatgagaatgaaacggccgaagaggatgaaagtacttgttgagtgaatgtattgtagagtggactgtcatatttatatcctagggtctcgctatgagatcaatcgaactagtctcaaaatgaatgagactgaaaggactagccagtctttctgccaggcgttacaaaaacaagcctagtcaatcaaaaatggtatttaataaaatcttctgcccttaagattcctgcggtcacggaaagggttcttgtttacgactcatcccctcaccctgcgatttgaaaaaggtaaagacatgctaataggctcttgagtctcgtaatagaacgattccggtcaccgaaatcgtagtatgcgtattctcgttggtggctggctaagatggacatggttttacttgccattacgttgttcggataatgccaaggccggcatgtgccaccttcaattgatacttcggtcttttggtagaaccaccgagtctgacgatactgcaagatgggtgccactctttcacggctcaccctctgctcacctcctctgatcgtgggattcattgtgtttgtaaagtcgaaatagatgggatagaaggatttacacaacattttgcaagtgacaagaagaaccacacagacatagcatgagctggagaactggggatatcaaattgtggttagcgtatctcttactctcgctgagagtgccactagaccaaaataggcagcacagtgtctgttgcttatggcggattttgtttaatcctttttccttttctcatgcttttgctttttttttgcctggagatagaatcttctgttctgctttattgctacaatatgtacctgacagcggctcgtctcttgtcttgactccgaaatcttcttatttaaggcggtcgccagcagatgccactatcagacctagagatcgtactataagaccggatagtaggggaaagtaccccgaagtggagaataaaaatagtgtgtccacagtaattattatagtactcactcagatggtctctagggagccaacaccaacaggctttccgaggcctaagagctcagactagtacagaataggtagaggctgatcggggtttccctgtcaatgcatatactagcgctgatcattgtatggaggtgggaggtggcttgctacaatttcggtatcctgggatattgtgaaatgaggtggctgttgattgatagaccacatgcctcccttgtcaccctttccagatgcaagtttgggcatgcaagcccagactagacactcccattctgctagggatcagactgtatgtgagatttttcagctccacatgaaagtgaattaggattatttctgttagaaaataaagcgcgtcagacgaacgagtcaaggtctagggtttatgtacctatgtcaatcaaatcacaggctagaagcgacacgcgtggcaatatataagtgtcataacctcttcagatccaggtttttttaccatactcagctatgtcggctgcaataatcaacgccggtaccccttttagagtaccactctagtcccgagccgatcaatgcagccagtgttgatattcctctctatcgtctgaaagaactgtttcccgacattcaacgcttcacagctatggctgtcgtgttttcctaccaccctgataacccattggcaccaagagttttattaatcaaacgaaacggcaaggaaagctcatggggtaatacctggcagccagggggaggaactccagacgagaaggacccgactatcatccattccgctgcccgagaaagcggggaggagacgcagatttggccttcgagaattgctggcaatgcttttacgtgttctttctatcacagagatagaaagaccagcgacatagtcatcatgcgcacgctcggattcatcatcgtcggcaacgaagagacgatggcgcaacgagtctggtccagcgagatgcaagagccggtcggccaaagttccgtcgagattagcgacgagcatctcgatcattgctggttcaccgaggaagaagttcgcagcgctgctctatatgagcaagccactccacagggtccattcgctatgctcctggccaaaatggacatggttttacttgcctttgagttgttcagacgcgagaattgcccgccttcaatagatatagcgccctatggcgtaaggggaacttggaaaatgattgagctccttaggagccctcaaatgatggccacacgaaaatccagcgggttaattggagcggtcacttaccactagcaactttcccatgcgccattttgggctatttgagaatctagtgttgttactaccgattctgcatatacaaacatatttcattaccattgacaattattctatttaatgcacagatagaaaaaaataagaaaaggatcagaaacttcgatactttgtatatcctcgctttgcgcaagctggcgactggtgcaagagatattgttctttttgaggagcagcgcgagcaatgtcctcgaatgattttattgcccgaaaagcaacaaccgcgactctccacatgagatgcgcttttccttcaccccgtccatcaatgagctcccactgaagacgaacattagagtcacccccaggagatgataccttcatgaaatttaataccccggtcatcgtggagtaatcaccaagtgctttccaggaaatggtggctcaagcttccctgccctttttgtccaaacgacaggatagtaatccaccacggcacgccaagggtcttcgggaaaggtgatgctggttttgctagaaattgactgcaattttgctttatccttcaagatgacttagtagtactcacattctcatccggggcactaaggcatacttcgagtaagcattccacgacaggtcgcacgtcctctttgcttcttggtgagacgaagagccaggggtatcgatcatgagatgtccgcgttatctgtgatctgactttagcagctgcaacagcagctgcgttctctaatagcgatttatacggcataagagaaaatccgaaggtgatggttggcgtaatttaagattcttctaaaaactgcacagtccgtctgaaaattggttgtagaatattcaggttgaaagcacgatttgaacagaaagtgggcgaatggctgaggggcggaggggcgatggcggggattgaaggtcggacagtcatacggtagtgcagtcacgcggttgtggtcccgagaggtttgcatggtttgcatactcttagtgcctaaggcaacaaggacttcgctttagcatatgcgcgatatgcacctgggcatgcaagctagtcttggcaagacacacccggggaattaatttcagtaagtcttcttttcctggtctctataaatagttaaaccgcgcaggggacaatatggacaatgtggctgtcaaattaccagagatagtgacggctatgcatttgaaccatataggatgcgtccatacacgagtagtccagatcggcgtcctagtagggcatcatattgaaatatatactttagcaagtactaacctattattaaccaacaaagtaccaggacccttaagcattcacgtaggtaacgccacgccaaaatgacttagcagaagagggaacttagggttcgcgaatgggttagaaagttagtatgcaatttgcagggttggccttccattcatttaggttcgcgagagcctcctcagtgaccgctttagtactaaaaggtcgccacgccttaagtataatagattctgtggcgggggattccccccacttttggacgtcttatagtaagaacttctcggaaaacttgcctatgattagcaaatagaccacggccttattaagggcaggataagattttgcggtaggagggttcctatatagggcgtatacaatcatagtatctagtgggaagcgggaattgtttctatatacctgtcagttaaggggggataatactatactaaaagaattcttacatttttttgcctacttctttactataccgaataagaaagctggggccgaagtagtatatacactactactaatacttaccgattttctttttattatagaaagatttataaagttttcttttctcaactggtatcaggcctctcgagttacaaagtgtactgataacatttctttttagagcagtctctactataccccattgacgtttatactcaatttctctaataaaaaacagaaatagagaatatcgagtaatacgtagctttatatcatatatattattcttattatataggcgtattaaataggttataagactggtacaattaggcttttaagcggtattcgaggagcttaagttattctaggaagggccgctctagaaactagagaccttctaggtataggagtattattctaaaaaggcagtaaggttatatgaataaaggtgtttaccggtacactagacttccgttagctattataaagtcagttaggaatataccgattctagaatattaggttcattcggttcacaatcttcaactactatacttggttactccggctcctctggttactccggctcctctagttgctccggctcctccggttacttaggctcctccggttgcttaggctcctctaattacttaagggtaaggtagggcctaaggttcctagaggattggtctgattgagatttaatagtaagggaaagcttccgcttagagcttgcctaaaaacccctaattgataagggtaagtgagatatatctaaaagcttcttaggccatgcagacaggctattattattaagcggagagatagatctagaaatgcgaccttagggatttgaggttaagtcgaccgaattcttatctttacttaaaaaccttatagaatcactaataaccaagttaatatctaattccctaaagctttcacttaaaattgaataattattagggttactaccccttatattactaggagtatagtcggctcgttactatagttctaataagtatcgtttaaataagtattatttacttgaggtaatatcattagagctaattaaattaatagtagcaatttcgtctttatcaggagtatctttaactatcggctagggtctcgataaggattatcggaagcgtttaggtattatacctctcgatttaatttcctctagtattacttttattaacctctctaatcgcccaatcgttagactcgttaggctaaccgaacgaatatatatctcgttctttgtatattaggtacctaaggtttttaaagatctaggctaagtcgatatatattagtggttattatctaaatcgatagtagaattgtaagaagttatatctaagttgtttagtaagtttatatttaggctatctaggagatacttatcgaaattattaggaaaagattaattataggtattaatagatatatctagaaaataaaggtaaattaagtcaaatcctcgagaagttgtgtttctaggcttctttactagataagttttagttattcggtaggactaccctatctaataatactataagatagccttaatttaggctactatctatagctgataaagaaaattgtctagagctattatactttaccttataatcgaataaacagtctgtattagcttaaatttacttataaaggctaataaccgttttaataggtaatatcgactaaagtttataaaagatatagactatatttagaatctataatagggttaataagcgttaggtcctaagtagagttaggcctacctctttctctaaattttctctaggtaagaagttaaagctcccttattctctatagtgattagcctaaaggaagagtcagatagtataagttctgattaggtagctagcttatattaagagaaaacttgatctaaagtattttaagggtaaaagcttctaaagaggactaaggaattcgatagtaaataataaatagatttcgagagtacttagagatcgctaatatactttaggggaagaggggagcaatactaactataaggataatgtaggtactactctttcttagcttaccttcggcttactctctacttactctctgcttaccctctacttacctcctctaatcgcgggatttattatatttataaagtcgaatcatatgggatagaagggtttgcgtaacattttataagtagctgagggtataaaaggaactttataataatctaacgaattcaacctctatagttaaagtgaatgactatattctttagtcttattgtaagttattaaagaaaggaaaaacgatctttataaagtaattatataggattagttaaagctgttattatataactagtattatagactaataataaacgttaatttatagtataattatagggcgattagagcacttagtaagcgcttagtaagtacttaggaagtaaggcagaaattattcctcccagcagaaaatgtaaatataccctaggacctagttattagacctagtataagttatatagtgctatttagtaggcttagcgggtcttatcacattatttcctaaaatggttacgtatatttaacaaatgtacaattaaggcttacttaatacattatgatttaggatcgcttaataagcgacctttaactgctatcacaaccaggaaccactaggtttctactccctactcgttatatataggcaactgtcgagtgagataagagcttttgcttgctttccctgcgccacctcttgttatattaaagtaaggaaatggataccctttaagaaatattattataaaaattggatggattagttgatcctagacgtgtgttaaccattacatacaatcaactcgataagcgttaagtaactaggaagtcaatagttcttaagggcagtgttagttcttacggtcctttccctttatacgtatgtcgaacgtgaagggagttactagctaagtgttttacttattcgaggaaatcatattgcttaattaatcaattaaattgattaccggcgcatagaatggctaaaatgattgattcgtttatatatatttaaagcaaacttagccgatgatgaattcttttgcccggctgcttaagatcacgtatatgcacaatatgaaggtttgctggtgctcaaggtatgctgtagtgacgttacagtcacgtaaaaggtatggcgggcaatatgtcaataacgttgaaagtacggttgctttcacgttgccgtacctatttgatgaccgcaaataccaccggtcattgcccttctagtcttgcggggcccgcattgtgagtttaatacataaaggaccaattttcgtggtcttttcgtgttctatgattggttactccccttcgtgcaataacattcatatttattgagccctttcctattagcagacctaagttttgtaagagtccctgctatctattttttctatatagatttctcttctcccaactacccccagatatcaaggcaatccgctcaatggccgctattaaggccaccaggtccaagcatgtcacttcgaaaataaaattgatacggcaaaaacaatgccgtcgcaaaacaagtctgatgaaaaaggcatgcgaatatagtaggatgtgcagcgcagatgtgtgcgtaggtattcgcatgcgggagaccggtcaggtgcatatcttgtcggcggatgcttcgggcttttgggcttttcttacttcgcaattggtatgtaaactacatggcatcatctaccaggcggagcgctgacttaacagagctctcattacccaactccgactgtgatgacagatcgtgatttggagaaaaccagggaggagacagtttttagggagcaacgataggaaaaaaaaaacgcaactgctgtacactagagtatgcaagttatttctatccttattgcagtatgtttttgcccataaacatttttgtgaaaaacagtttttgcttttcctttcactctcttacttgctatgtcaagaagtatatcagaggctgtgctaagccaaatatcacagtagtctacaatatcattgtgagtttcatgaataaagcaggaagaggctcgaagcttgaccgggaagagccgccaaattgggggagggaaaggaagatgagccgccctgcaatagaccatatcatgagagatatacacattagagtaacaacggtcccaagcagcgatatgggtgcctgagaaataaacgtggtaacgctgagcgagttgttgcttccggcataaatattagtcatcctgctggtgaggattactatccctgggagtataaagcaccgtggtttccttgcaatagttgaaaaatatgtgatacccaagtcctgactgacaatggaaatcacgatcttttacgccattgcagtggggtgcttactgacaacgctctttctcattcgcatagccccctcctttctgaatctactcggaattttgtcgttcctcattacgaaacacttaacatatccatacttgtggggtcgctataggctgattgctccttgcactcgagcagatgccttattatatctcgcgtacgctgtaacaaatgtttttcttgttgccttcaagactccgtcaacaacaatggcaagagaccgagccggaaccctttcagtgatcaacatgagtttcctgttcttggcacatcatctaggattccttgcaaacgccatgggtgtttctttgatggcgtgcaagcgcatccatcgggctgtgggttggatgactggcattcttcttggtttacatatcatcatggcaatgataactgatcggaagagctggatacttcgcgagaagcctaacctctttgtattaattgtttgtcatcgctctcgcttaacctaccctgttagattagtagcgctaattcttcttagggctctgtgattatggctgcaattctattgttatccttccctttcgttcgccgtttcctttatgagccattccttcgactgcactaagccctggctatagcttgcatatattctgtatggcggtatctgccatccggtactctgctgccccggctgtatgtttacattccgcttggcataatgctacttgtattgctggtcgaacttttccttttcattattaggaacggtgtcttccccctatgtccctattcttgtgcctctattagatgtgatcgggtgtaacaaatactaatacagagcaaagaggtaataccactgaaagtaaggagcccaacctcttcgcattaattgtttgtcatcgctctcactcaacctaccctgtcagatttagtagcgctaatccttttcagggctctgtgattatagccgcgattttattgtcatccttccctttcattcgccgtttcctttacgagccattccttcgactgcaccaagccctggccacagcttgcatatattctatatggcggcatctaccatccggtgctctgctgccccggctgtatgtttacattccgcttggcataatgctacttgcgttgctggtcgaacttttccttttcatcgttaggaacggtgtcttccccccacgtccctattctcgtgcctctatcagatgtgaccgggtgcaacaaacaccgatacagagcaaagaggcaacaccgctgaaagtaaggattgcactcacaaggcccctacatatccaggcaggccaatacataagtctctggatacccgcggcaagcctattctcctgggcccagacacacccgttcatggtgacatcttggtcgccagaaaagcaggatgtcctggagctttttgttcaacctcgaagagggctcactgagactattcaccatcgtacagcactggatggctatacttccttaacagcatttgttggcgggccgtatggagtcagcaaatccgtagaccattacgaatgcgtcttggcaattgcgaccgatttcggtatagcaggtgtcatatcttaccttaaaaagctcctatacgggtacaacacttgcacgtcacatgtgcgccgggtacatttcgtgtgggagatccaaacattgggtaagttcggcccccgcgttcaaagagcaaaccaacgatgctgaatttctcagatattgctgttgcagcccaaccacttctaaacagcttgttaagcgatgatatcttggatgatggctatgtgggttggctgttcatgtttaaccatactcgcgctaataacgtgatacagatactcgaaatgtctttttttgtggcatcaaaccagatgatagaacatggcaagccgtttggccagcatcgccgcgcgacagttttcaatggaaagcctcggtatgatgaaattatatcagaagaggcttccgggcgaaacataaaacggctgccaaacactcatgaagaccgcggtgaggttctggttatgggtaagtccatcaccttgaataacaaaccagacgctaacttcctagtatccgcatcgcatgaagtacgagatcgtttgagagaattagttcgtaaacacctcgaacagagagtaaggttacatgagacggagtttcaaccttcataacgagaagggactaatctgtcaagtggggggagatggggcgggtggggccagcgaatgaccaattggccacagattaaatagaattcaccgccctccagaaacaagtttaaccattgcacccgatctgttcttcaccgtcaccgtaaaccgattcatcagtgtattcccccagtccaaggaacagcgtatgctctatgattctgtgatcagttcttgtttattccaatcacggcataatttaggatttgtaaacagggtgtactccattccctgatcggcttctgtttcaattctcacagtttcttagaaagcgattccgttctgactatgaccttgctgttgcgttgacgaggattttcataagggcatggcgaccggcaaaatctacttcaacgatcccatttttttttttggcgggttgggaaaactgtggccatgagagaaaaatcgtggtcaaataattcgatttattgccgtttaggttgcgacacctttttagggtcgcaaccaaaacggctcccagttgtcacctttcaggatgcgcctttgggagacgcttgaaacccctgtgtgccattgtttattttattttctaaccattcgctttcttcctccaaattcagtgtctgttcctctttacactttgcttgacagaacacgaggcaattcttctactatccagacgttcccccttgaagcccaccgttacgagaagttgaccatcaatttcttagtgtcgctgaccagcacacgaataatggtatcatttgacccagacactttagtctctcatggtgcccctggacccgatatttctgatgatgaccttgttgattgggatacctggctcacaccagaggcactccacaatgaaaaatatctggctacctcacaatgcagctttatcaacatgggaagctgtactgagcgtcagcatttactgaaacatgctcctcagcttcattcaaaccagccagaagtccctctgccatcagatgggagtttacagttgacgcagtccacagacggcaacaaagagacaatgacaataggtctccaaacgtcgagtgcaggcgtatatgcctttgcgaaatgtggaaacacagaaatccaacccatcgtgatcaacgaaaaagaacaactcaagtattcaaagcccagtgaagacaattacagtctgttcggccttgggaatcaccaccagagaagagccctcatttcaccagatctcaagcttctgaaagtacaagagatcgaaagggaaacctttcacaaatacaagccagtcgataaccggacccaggcagctgagtacgttgactgcattcaaagaatatgtcagattgcaactggcgagactatgagcgtaaaacaagcccgagacgtcgaagactgcggtgatagcttgatcacaattatacgatccgacggcccgattgcctcgtttaagtctcttttacttaactgtcacttgtataccttacctcgtgttgacttgaattcgtccctagcggcatgcgtgtcatatctgaggtacttgaactcgctcacttcttcaatttcgaagtcagacgatatgaatcgccgtcttgcccagatttggatccatattcatttcgaaaatcatgtcaatgatttaaaggaaagtgagaaaaacggtcttccgcttaaccgacaacgtcgggcaatccctacgatcgctagagattctatcttacaggcttttcatgggaaccaattcgtgccccaaaaaacagatcgcgactatttgagtgatcaatgccgctggggcgagcgttggtggaaagctgctacttgcatgggacttggtgtgatcttactagccagtgaagacttggcaaatcaaatgtatgctcatttatgccctatggaatggttttattgctgactttgaatagaggtagaagaacagcttttcagaacaaaatggtagacacgttggccatttatgttctcaatcgctacccagctctaaccagtctttatcgatcgtttgagtctatggcagtagacctcatgcttggaggtgatatcgtctcttcccaggaccagctaaacctcatccaagaggcgcccgtggagaatgaagcaaattcatgcaagctagaaagatgggtggttcccaacctcaactctctgtctagaattgcttcttcccacctgatctttctccagggattctaaggccatagttatttctagcaggtgttgagtcaaacatattatctcataatgccatcgtctctcttgctcttagaccgtagggaaccgtgtcccagagggaggggccttttccaagtcgcaattgctgactcagatttagctccaaatgaccccctaagctgaggttattggatcatatcctacaaccaatccttgtcttctcgatacgcgcgctggctggtggttgcggatggcaccaccttctcggtccctgtcctttaaattcttcaataaattcgtgataaagatcgtggtctattagaggatttcggccacaatgagtcaatcacgcagcatgtatgaagtctcttatgcggcagccacgtctcattttaggaatggcgcctcatacccatctcaatttctcagacgacattccgagcccacgatctccttcactcgtaactggtaattattggttttgtaccgtgattttctgaatagttaggacctagccgccatttaaggacctactagggaaaaatagcatttctaggttcttagtttcttcagtactcaaaattagagctctttgctgaagtacacgagctaatagattacattgtctggatgcacgcttgatgcatttactgacaacctttccgacatgattgaaagttacgggtatatgatggaacctttgaaaaccatgagcaagccaatactcacaattccttgaaagatatcgtttcctactatctctcgtaggaatagaacatccttgcagagactaaaacagaccgagcaagaagcatcaactctcctaccaatcggctttctttgcggacaagcggttgctgataaatgttagttttatattcgtctactcatgacatgttggcttgggtacctctttcaaagattcaatagactttgctgtcgagagggcggaaaggaacccaaaggcatctgagtcgacaggccaacgatccacgtcatctactcccaccattccatcatctttcacatacttctgcatgatttccatggtaatgcaagcgagagttttgatgtatacattctgtgcctgacccgggggacgttctacgcacatctccaagctggctataggggattagaataatcattatgaaggacgcaattgccacttaccgatcttgataacgccatctaggccgagaaggatattccggcatatcagagactggtgttctaatccagtttcattgaggtaacataaaccattcaaaatctgcactgtcgtgagcttaaaatacttgaagtgtcaagagccacatacctgccaagtcatagaagctaattccgcctccgtaggatagagagaccgacaccccacaagctgctccaaagtgagctggaggtcgttgacgagagcgtacatgcatccttcattaacgaagcactctcgggccgtcaatacattatcgtggtcaaggatatcatacagtcgtcgcattttagccacgtcccctttggtgtactcccgaatggctactacctgggacggatgggaacggcgagctgcaatgaacacctcacctgccagattacacctgagggtccgacgataggtgtcccagggtgattcctccctcacgattaacccgagatatgtaccttcctcgcacacctgaggtaagccaaagcattttgggcctccactcacaacctttcgtgtatgttcgctccggggagacatttttctcttttttgagttggaactactgtccaattgggtgggtgcatcaagctggtgtggctgtttgctcaagggtgcctctcgtggtgggttattcgcaagtcgttcttggtagctcttgaagtcaatcgccgtgcagtgcttgtcttgtttcgacatatttggaccagatcaagaggtgcggaaaggaaatgaggtggaaacgtatagtgcttgaaggcgaaggcctatttataatgcaattgtattaatggaactaaatctgttttgggggccacccccagcttttgcagtcacattggtcaccaggacgctgaatcagctaggtggaccctttcttctgtgaggccaagaccagtcaaatataaacaaccgatactctactgctacgtagattctgcctcaccagcacaatggacgagtctatatacacagatcctgagctgcagatcctgacagaaaggtgtcggacttaccaaggaacagccaaggttaacatcagccagattaccccccacccatccatctcgcaacatatgaacacaaaaaatgtggaaagactctgtgagatatttgacaaagaaggttgtcgaagactcgatacatacaaccacgtgagcgctgttgtgtcaagagagcatctccatgaggctcttcaagcagggcgagtaaacgccgctgacatgatgactgatcaaccgagccgctacccacacctccatttctccactggttccatacagtgccttcatggtcaacatcgattaaaggccggagaacactatttaccatcgatcgaccaatggtggactgttgacttgtatttggatggtaagccagaaatccaccacatgctttcccgcagttttgacaaccccaagacattagtcccgatcttcaaacaagccttgtcgatgaatattccaacgagagagttccaagcgatggtgagatttacctgaaagttcggcaatatcgatatgaagcaaattcacacttcgaaaatcgatggttggcgcggctgtcagacaacaaagccaggcggcttcgcggacttgagtctcatccgagcgtccgagctgcttttgactcgttactcggcttgccctccttgatgatacatggaatgcaaatcggatctcttccgcaggctctggctatttgctgcgacgaggtaaggtcgtctgactcttaaaaaaacatagatgctgattacgttcgtaggagatagttcacgcgctgactaggctacggcaatactggtcttcactcgtgggacacgatcgtgctaagatgctcaaagttgaccctcatacggtggaaacattgcaactcctggcacctggagtctcctcgaaggatagaaccaccgtgaaaggtcttgtacacagtggcgaagtcttttcaaatttcacagcatccgagcggacctcaatttggaagcgattaaagaggacagagggcataattccatctctgtatacgtttttcaaggatctctggtacctagaatcatgcgcgaactgcatcaaacggcttatcataccttccagatcattccccacgattagaggcgccacgcgtgcggccttcttgtcttttgattccacccatacgcagttcttgatacaaacatccgaagctgggtttcgatcttactccgaagctgggtttcgatcttactcgcactcccagggggacccagcggaacttggatatcgacaactatggctctatgctatgcgtcactacccgaagttatccaaaaagcctcagaagaaaaatcctacggcgaagcctaattgtgaggtggtggagcctatgatactgtatgagatggctgtactcgcaaagagacttgggtttcagtcgccacaaattgagcagctcatccagcagtcgcccgatcggcaaattgcgcaagatgctcttttgagagcccgtcgaccagatcgttatcggtacaatagggaagaaattgaatctctgatcaacaaagtcaccgagtgcttcttgagggccgtccttcttgaccataagcttccagtacaattcgttggtggaagggaatccaagaaggaatctcgatgtggacatccgcaaaccgaagcccaactgcaagattgtcaattccttttcatcgaccaactccatggtgattccctccaaagggaacgaaaagctacttccactttggtgaggagcagtgtctactttaccttcttcagcaagctgtcaatgccctgtgaaaataacgacacagcgggtatatctccaactccagacttgccaatgtccccgctttttattccgagcaatagttcgccgcaagatgaaggagaacgggttgggtctgcgggtacaggagccgggcaggatagcaacttagagcggcaacgtttgaaagatgcacgccgagggagacgtcagcagaagcaagcgaagaagctacagaggcaacagcaacgacagcagcgaagacaccgatcctcacgtgcgggccgtcattatggcaaggaaatcgcgcgcattgattcggaaggcagccggataggagaggtagtggagccagcatccgagacaggatttggattcgttggaagtaggggtataataagtcaaaatgagcagggtcttcttcatatggaaccagccgaagccgatgaactggagcatggcgagattattgagggggatcatggtttcagcgacgaagaagaatcagaagatagtcacgctggatttgggtttgttccctcgagacctccctcgctttctgttgcgtcaaggtatacctccacggaactacaagtatcaacggtctcgcacgaccaactgtccttgatgcaacccccacagtcaccaggagagtttcgtttgacatctatggcctctttaccaccacacccagatatgaattcgcatgagaggcaacaacacctcctcgccgccggatttgaagatcacgactctatggcaccaacgggcaaggaaaacaaaatcctccgtcttgctgatgccgaggacgagcagccgcggggagggggcgaggaaaacatagccgggggagaatcttcgatagatgtcaatatggaagagcacgcaggcgaacaagagaatgaagcggcagaaacagcagcgcagctttcttcatccgaagaagttgaaaaagcactggcaattttagaaggacgtggggcatcggagataacatcgggcccctctaggactgtgggcaccaaaagtgcggcgctgcgagagagcgctaaattcaaaccatacgaccgcacgcaacagcgcgaacaaacccgcaagctatccattccgccacaggaaactctggagcaggatataaacgcactgttacgaacggctgatcaggaacagacagcaagacctggtactcaaattgatttcctcgaagcacagcatcatcctttgttggagatgaatgaagagcagagttcatggcccgtggctagtcaagttggcctgactcaggaccagcaacaggcaccggaagaaagatcaggctcggtcgagttagaaccgcagccagaaatttcgagctcgatcgatcaaaactcagaccaccatggaataaggaatgtccgatcggaacaggaagaacggtcgtctgagtctgtaccgctggacgcttcgccgcaggttcatgttatcgccgatgctacgcagaaggacactctggtagagcgcccctcgtcgtcactacaacgagagtctcccgcgcagaccgatacgcgcacacggatagaaataactgggtcagacaagttgcccgaggaacaagacaagtctcgtgagcgaggagaaggagcgagcgatgcagccaagcatcctgcagtgacaatcatgttccgtgcacgtgatgaacacggcgactggaatcgcttggtccaccaaatggtggtcgatccatctgacccctctcctgttgggcgaatggcgtccaaaaacgcgcgagaacgtcaggcaacgttttatgaccagaatctacggcaggtcccaccggggcagtgctttgatgcggcaattgaggatggcacgaacacgatattcatgacattcggcgacgatctggttgtgagtgaagaggcggtgaattcgatcgcacgagtaattgaacccggtagcgatgatgatcggccgacaaaacgccggcagtaggcgataataatgcacttgagatctagatcaaaatacttgtatcccatatagaccgtagtcagaagaccgaggacccttatggtcactgagccagggtagccgccagttgacagctataaagcccacctagactaggagccgtggacgtacgtccaaagtgggtccacgtccactgtcttccatcggtggcctcgaatcaactgtgctaggtcacagtgcctaaagccaaagccttcccaccacagcttcccaaccacggacccacatctccagactcaaagcccgcttggacgcagatccacagatccattacatgactggccttaaggcactggatttgtgtctttgtcggcctggggacaacataggccagaaaacactcttcctccatctatggaagcgccatgtccagctttttagttgaatccgtcgtaaagctcatctagcctcgatttcttggtaaacgtccctaaaggggctcttgaaccctccagtttgatactgaaggtaggactggatacgggcgagcctctcacaccaagatcaatctcaacctctacccaagataccccttttccagctagcaaatgacgcaggtagcggggctgggcgttccagtggggtcaaggagaccatgaaagaaagatgatcaaattcgtgggccttgctccaggacgctgagtcagcgtcctggagcaatcacattgaggtagcatgtagacgacacatttcttgttagccactgatcaattatttaaactcatgctgctcacttcttctgatgctcctgtatatagtgctgcctcgagtttaattgataacaccgacgaaatatctcgttatgattcaagtacggccagagtaagtacgctttcctttcctctggaggcgttatctaaaaacacccagtcaatttatctcccccctcgcatacctggaggttggccccaacgggaagaaattcgctgcgcccagcgggataatccaaagcctccggtgtcgttacaaaagttcgcccgaaataatatatgtggttgacgacgatgttgaggatatctttggccatattcttcagtaccttcacagtggggactactctgtccttattccagcagccgataaatcgagtcatgcttcatgcgaagatgaaatcgatattgcaacgcaggatctgcttcccttgaaagaaaattattttgcgagtcatgaagatatccaggtgaagaccgacaattcgatatctttgccacattgtggggatggaaaccacctgtgcaaacatcccaagacactgctggtgcatgctcgtttgtatgacttcgctactagacatggattggaccaacttggaaatgtgagtttcaacaagctttactggactctctcggaatatccgttagattcagaacaagcggacgcaatcgtcgagcttttacgggttgccaatggaataggcaccatctatgcgctaatgattcactatgtatcgttccacctaaagactttcatacgttgttccagttttctctcgttcttggaagaaaaccatcatatcagcttccacttgttcaatctcttatgtgattccctgtgagcctttattcttcatagaagggcctagagcgctgaaagtatcctgggatattgagatgagatcacgtgcccctgggtacgcaagccagtcttagcaagacacacccggggaattaatttcagttatagtatttaagctagaagatctgcctcgcttggtttccttataataccttcttcagccttccccaggtcttgatccatgattaaaaatggggtcggataataggaggcctagaaaagttagccttggtcatgtgactcgtttctgcctgcatactagttgcgacccaagaaatccccaaaatcccgaggcatccgccgataggataaacacttggcccgtttctcgaaggcgaatcccgacgcagacgtctgcttcacacaacctactatattcgcgtgccttttttattaaattggatttgcgacgaccttgtttttgacgcattgattttcttttcgaagaagagccatttgaacgagggcctgtagtcgccatctgctagtttgtagcctgaaatatgcctcgggactctagaaatagacttgctggaatgtagaattaagaaataaggaagtgagtgctcttatagttatagacttgttggctagggagtagcttttaaagaacgtctaacgagggcctgtagtcgccatctgctagtctgtagcctaaaatatgcctcgggactctagtattagacttgctggaaagtagagttaagaaatcaggaagtgggtgctcttatagtcgtatgcttgttggctagggagtggcttttaaagaacgtcaaacgttatgaaagcacgaaaagcgcaaaagcgcaaaagtgcaatggcggtttttgaacatataaccgtgccaagcccaccaacacactacctgatattggtgggcttggcacggttagtaggacttcaatctagcaaacaaatcaaaccaccaattcaagcaccaacaacagcactgacgatagcccaatcgactgcaagtagggcacaggatcttcattgccaatagagtaagactattctgaacagtttcgtgctacgtggccaggctgcccacaactgaaacactgaccattctgccttcgctcctcagtaagttgacgttcaacagcgatcgctttctctgccatcttttcccacgtgtcaggaagctcccctaattgacgaagaccaatttgcaattcttttttaaggctaatgaagaaaatggatgcaataaatgtctcccgtgtgattttgcttcggagcttcaggaattcggaaacgtagtcagctgcgctcccagtctgtaccagacattgaagccgaactactgcttcgattctagtaaggggctcattcgatgccgacatgtctattgtcatgctaagagatatttcttaggaaatcaagatcaaaatataggacttacacgtgatagtatttgttcgcaatgcccacttagctcatgaggtgccttaacagagtgcaaaaagagcgaaaattaccactatatatctctagagcaaaggcgaggggtaggtaggagccgcttatcgattggtaggtggaagagctttattggaagcgcttctaaagaaaggtcctggccaaagtaacactgcaatatagttttatataattctaaccgccgaccctatctataccgatagtattaagttaactaaggagaagggcttgagactaggtataaatcgacctttatctactattagtaataaactgatcgtttatataaggcggcgcgaggccactactcagccatccgcgatataaagaaatacaattattattacagatttgggactatatatattgtatctgtgcagcgataaagctaagatactgctaagcagaacgtttatactactagcggtttaattatatacgcgctatattgtgagctccgagtatcgatcctaactatcttaataaataaaggttattaggtattactagagacggaggatttatttttatgaatttagatagttcgcaatatatccaaatatccttagaatcaaaataatagcgagggggtcacaaggttatagattaactaaagttatcctatagactgtagaagttagctaggatcgttaatcaatcgcagagtcctaaaattaaaattcgataaaccataggaaaggtcgctcggtaagagaatacggttattattaataatccttaaggaaagcttatctataagcctctactccacttacttttaggttacttacaattaagctctatagctctaaagagatctagggcagaatcaccaacttctcagtcggatcatatatataatattgtaagatacaatactttatcaggaagatcttctacattcagcgttataatcaagatacgtaaggtgattgaaataaagttaagggctgtaggagtaccggcctacaatgccgacccttatttaggagccaatcgatgtctctgttctagtctaaaaaccggagatatttttttaccttatatagcttgtctgtagttagtatattttctataagctatctactagagatattaaattagcaatcggatttagcagatagagaggatgggttaggcttaaagagagtatagtttgtacgaggaaggtttatataagacaaaagatatagcttctagaaccttctatagactagataaagatagcagcagcttctgtatgaaggaccagtctctcttgcgagggtaactaaaccgtagattggacctcgttgagaaaagtttacgatattctaaataccttatctgtcccaaccgactgcccaagtaataaagacctgtcctatctgtactctgacggcccgtcaagactaggttttagatcgtgtctggacccttgcagatccttccgatttcttctgcgggccacaaatggaacctctgtgatctactatcctatgggtcgtccctgggatctgtatcgctgaactgtatctacgtctgtctaaagtcacgcgcggtgtttgattggtccgttgggtgctatttgtatctagggtatcattaatgtgacagtagcgttgcaatctttatgagggggtggcgatcatgagaacctaactcgtaggccatggtagctgaaataactcactatattgtccagtggactcaggtttactctagtttactctaggtttccaataagagctagactttttgatttctgttaaaaatagaaaactaataccttggatttgggggtattttcatagtgtctgtaccgataggtagtaaaagaattggtagagacaccatcagttggttacgaacgacatacaaaagtaccatttgagtagtataagggtagaattagacaaagaggactgtaattggataaatgggaggcacgtcctatagccaatatctggtacaatcgaatgtaactgtctgccacattgtccaacccattattgcggtacctatcgaagtacttcaacccttatgaaatagatagtaaccataactagtgactatggtcaaaataggcaaagtaatctaccactgcattgaggcatctaattgcaacttaagtgatatataggaattagatttttgcggcgttactttctgctcaataggtaataataatagtttaccacacttaacacaggttttaaatgtaatgaatccaggttgaaacttgagtctataggccacaaagtctcctaacgccatttcaatgttattcaaatgtctttaataccaataataagacggtgattctcgctactatctgcgcaactggttccttggtcgagacgtagccgaaaaaatataaaagggtctagattcctagcccaaaagaatcaggacttcggtcctcacactccgctgtgtcacaatgtccctctcttgcctgcgggcttgagcgtctccgtggctacggctatcgctgccacgagcccagcgatgtaagagggtgcttcgcaggataggtctgcgtcaacaacaatcctcgcaggagaccgctacgttaataagttctctgcaggagaccgctgcattaccaagctctccgcagcctaggtcctgcgtcaataacaatcctcgcaggataggctctgcgtcaacaacaatcctcgcaggatgggctctgcgtcatcaactgtgtctcgcaggataggctctgcgttatcaactgtgtctcgcaggataggcagggacatctgcgacaaaaagagtctccgcagggacatctgcgaaaccaagagtctccgcagggacatctgcgaaaccaagagtctccgcagggacatctgcgacaaaaagagtctccgcagggacatctgcgaaaccaagagtctccgcagggacatctgcgaaaccaagagtctccgcagggacatctgcgacaaaaagagtctccgcagggacatctgcgaaaccaagagtctccgcagggacatctgcgaaaccaagagtctccgcagggacatctgcgacaaaaagagtctccgcagggacatctgcgaaaccaagagtctccgcagggacatctgcgaaaccaagagtctccgcagggacatctgcgacaaaaagagtctccgcagggacatctgcgaaaccaagagtctccgcagggacatctgcgaaaccaagagtctccgcagggacatctgcgacaaaaagagtctccgcagggacatctgcgaaaccaagagtctccgcagggacatctgcgaaaccaagagtctccgcagggacatctgcgacaaaaagagtctccgcagggacatctgcgaaaccaagagtctccgcagggacatctgcgaaaccaagagtctccgcagggacatctgcgacaaaaagagtctccgcagggacatctgcgaaaccaagagtctccgcagggacatctgcgaaaccaagagtctccgcagggacatctgcgacaaaaagagtctccgcagggacatctgcgaaaccaagagtctccgcagggacatctgcgaaaccaagagtctccgcagggacatctgcgataccaagagtctccgtagggacatctgcgataccaagagtctccgcagggacatctgcgacaagaagcccctctagcccgtgcaggtacctcttcgtggtactagggaccggtattcgagtatcaagagtactcgaagaagcaaagacctgtgtactatcttgatgatatattttgtatttcgaatgattgtctttagagaaataaaatgagccctagatagaagtaaaccaattccaggattaaaactttaagattcaaccttcgttatcgagtgctgtattcctaaccctcctatctttatggtttgcggtcggctagtcttcccgccgcaatagaatatatctaccatcagagcgtagagcgaataaaatggtgagtatttgggtgcgttgtggatgtgttgactgggtgttgatagtcgttgatggttgttaatagtcgttgatggtcgttgatggtcgttgatggttgttgatggtcgttgatggtcgttgatggttgttgatagtcgttgatggtcgttaatggttgttgatggtcgttgatagtcgttgatggtcgttgatggtcgttaatggtcgttaatggtcgttgatggtcgttgatggtcgttgatggtcgttgttgaacgttgttgaacgttgatgagcgtggacgatagtatggacgaggtattgatgtgcgtattatagtatatggccaggcggtgaagttgagtgatggtcactagacttcagcaaagcccaaccaagcccatttctatgcacacacctaccgtcttggcattcataaccctactgattaatgttatttttatacatgttctaactaatctgtaagcccagatctcggcccgacgttttccctggcccaatccgggggttcaactactccaagaagcaagatatcaagtattaacggcaacgacctggtaataaaagtcatggaaatcaatggcgacacttaagacccgtttatataggaattaccaagaaaaagtcgagttttaccaggattttaaactattctagcacttagagaattcatgagcgccagcatatggttatatatatttcataaaagcagaagtaggcgcatcttcctatttaagtataacatttttaattgtagaaacccttatttttaggtttatagaattcaactttatacctaaagctagctaatttcttataataggtgtccttttttatagataattgatattgggaaaatctacactacttatgcaaatgctaagaattggtatgtttatattaggccccacgaaagcctagggaacttctaccttaggcctatagaatatctgtaggttggggtcgggttaggccttaggcttttgccggtccggaagtctatatataacagaaatattagttttattattttattctgtactatttggtatcacttgctacgatgatcccctggtatttactcagtatttttggtacacagcctccaattcgattgagctagtctaatgcaaatactaatatccctcgataaagctataattaggcaaaaaacctacaattagacctaccaagtatagatgaagtattgaataaagagcgctcgaaatgcgttttattgcttaggtaattatagtgatacaatagactgttccttgcagtcgaattggccgctttaggcggcttacaagccacttactcctactctgctgtagaatgcctacacctataacggtcgcgagtcaaactggattcctaataaagacggcgaagaaattgaggggcttggcttgaaaatttccgattggcttcttctatatgggagccgtcgcaccttggtcagttatagcaattacgattatattgcgagcctatctcctatgtagcaaccacaccgcactcaaattggcgaccactgctttctaggcgtggtgtcggagcttatgcaatcaagtgtattccactgtatagagaacatggttgcagcccgatcgggtctagtaagcgccatcttgaccagatctgggaaggacgattccgccagcatttacgacggacttggattagagctgcagcacacatgcacgttaccaatgccactgaaagcaatcacatgaatgctgatcaggggaagaaatcttagtataggctgtcatagatactcagagaggtcgcacagaggatggctccgagtaaagttgtgcagatacccaactcacccttacaaaggatctacttaaacagtaatataccagtccaaagcgcggtgtgtctgacaaataattgatgctcaagaacagtcgaggtaggggacgtagagaactcagccattccctgagaaaactgcttacacgcgatatatcagaagatggtttcagtaagagatacaggcgctcgggttaactcacctacagatgcagtgacatccaggggaaatggtctttacacacgttactcggcttagatagaaatcagatccagccagcgtatatccaaagacaccacaacacttctgacggtgctcatgatacagcgtcgtgcatgtctggttgattcattttcacttgttcgtttccgcttattagccccacccgctggaatacgtcgaccggctcagcaacacggaggatcaggtgaaactatcggacagcatccctttgctcgtgctctctgcttgactcggttataactcgacatcctactgtctccatttatcggttcgtacctgatataggcaattttcatctgtaggctcgagataatggggtcccgccttaccttctccttgtaagtagacttagactcatagcctgctcgttggagaaagtaggactcatccgccatgagccagacagaaacataagcttatctcggtgtctattgagctgccaggaatcaaaagacgtgagattcgaatcgaggataatgaagatcacctactggacgtcaggagtttgatcataaggaggctgttctttcgcggtatttgaatgccgagatacggtagtatacgcctattgtcgcttgagctttgtatcgggtagatacattagtacctaactgatatagagtcaactgagagaagggccgagacgatctggaccttacgttagcttatcatcgatgccgccagtagttatatagaaataatagataatatacgatcgcattagtagaggggagcttgagcagagaaaatgagggcgtcctgttatacaatacgagttagtaaggcttaccacttagacgagctgttatgacttacctatttatagagtttgcagagggtacgctgtgtatacttgagacgagacgattagtaagctttatggttaaataagctcaccaaatggatcacttacaatcctttttggtaaggcaatacagtaccatttacgccatattgtattctggttcgttgtactctccggccgttactctaaaagactgggctgagtataaaactaccggcattcctcggtcttttagagttctaggactgaaaagacgcgagatgccaactgaggacagcgaggattacccattggacgctaggaattcgatccataaggaacctattctttcgtggtgtttgaataccgagatagacagtggtttagcccattatgccttaggctttgtatcggtagatatattagcacctgactggtatatactattgactgagagaagggccgagataatgtgaatattctagtcgtttctcgtccatgctactagtggtcataaggaagggatagatagcttgcgattgcgttggtataggggagatcgagtagataagtcgtttactcgctttatattctactcgagtaatagggatataagggacctcctgttatatgatccgagtcagcaaggcttaccacttggacgagattttataacttacctatttataaagttcgcagaacattcgcttgagacgaaacgattaattagcttcgtggtcatatcttaccgatgagatcacgtataattgtctttatcaatacagttaccattcatactatgttgacataatgttgtatccagtttatcgcactctccggctgttacttcgaataagctgcactgggtgtactgggcaatttctgagagctaaaggtatataacgaacctatgacagaaattgtacagccgtaataggataaaacctcgcatagggacggtagaggctcatacactctgccgttcatggtataagggcggtaaggttaaggcggaagacacaatagattatgcgtcgtagtgatgtggtcttatctccgatctagtgataggactctcaacgggtatctttcacagtggtgatagctgctcctacagtggcacgaaaatcagtaatggtattagtgattggagcacaaaagttcgtaataactaatatagcgcagtagaggatgcgatcaattactcacatttttataaagaatagacgtcttaagcttctgcgcagcgaaacttgtgatcggatgtccgtacctgttattagcccgttccttctttacctaattctttactgtgtggtttgatacgatagggctatgaatagtgtataggcagtggctttatatagagtactaacggggccgctgtatcctcagggacttctggtataatgccgatattcactatcgttcattagcttgtatatcgtcgatataatccatgactcacatattttggtagctaaaactagggactaagagacggtaaagagctataactcttgcgcttgtgtattgtggttaattgtccttggttctattgaaatcgcattgtctgcataatcagtagaatttaggcaagtcaggctaagaatcacatacctgcgatacgaatattcgcgctgtctcttaggaagatatacacagaggctgtatagtagataagttcagacagctgctgtgacgtaggcatctttgtatagacacttggacccgccagcctaagtcttgtctctttaattagctgggatgaatggcagtatatctggtgggaatcatacctgtatctcttataggcactgtctagcttgcttatctacgatgtattctataaatgtcagtacagtggaatttaatactgggtcaaaggtggagaacttctcaagtgacccagacataagcctactcgactttttgtaatcaaatgaataaattgaagagtaaatttccggggggtagagaacgtatttatagacttcccggctcatcctgtcgccgaagtgcgctgcttagaaggacacgttaagggagaactctcttaattgaggcctattgaaatccatttcttctttctaccgcagatatttgcagcgatatttctgatgcctttagatgctcagcgagagagataattaaaagtggtgttgaacaacagcatgctgagttggtcaagaaacgttggctgactgttgaatcctccacgactctttaaaattgaggcactgagtatactcaatccgcaatggcaggctcgtatttcttgttctgataccttacctgtgagtgactcaacgttgaatcaccgaaaagcgcctacaatttcttactcgaaatcatggacttttttcctagcctcgctttagtatggtgttggttttgttgagctgtaggtctgtccgaccagactgcggaaagcgagggcactgtaggacgtgctcggcccatcaacccgttgaagcttgacttaccctgacgttgtcaacactcaattttcgaacttgtgaccatgaaaatacattaaataaaaaatctagtttttttcccgaatttctttgtttaatgacgataagttctataatattccatttatcggatttctgagccatttaacgaaagggaaagaggtatctgattgaaatgtatatctttaataagccttcatctggccctcaataacgtgagcttgatcggtttcccgaccgactatgcctattgttgaatatactgttagcagccggctgaaaattaaagtaactacagttataatttgactgcttcgattgaccgttatagtgattgtaaaacctagcccataatttatacacgtacatgtgcacagtctataagagacactaaggatcgatggaaattgtattaaacagacccgtgactttctcttgcagacaaaatggagtccccaaatagctcaataggccaggaaaaagaaggagatcagcaaccccgtgaatttcctatccccgatgagatagacaaatcaaaggaaaattctgaccatgtgccattggtaagtgaaacgattcggcttcaaacgctttttctaaccattgcagccctccacttcgcagcaggaagcaggaacaagacacaccattacgaccgagccatttcaaccgatcttgaaggttctagtagacctcgagcgcaacgatcctgagttcgcctttccagcagctcgacttatcggactctatcgacacctataggagtcatatatatccaagcacatcgatagccagaacctagagcaggaaaaccttgtcttaaaggaggctggtacgcacctaagacaaaagagggacggtcttcaggttcaacataacaagcagctatctcagctacgctttttcgagcaggcactggaattatcccaggagaagctgactagcgtcctcgataactggaatcatttttccagtctcaatttcgcaaggctcttcaacgaagaaagacaaggttaaaggactgtctgttcaaggcgatgtgccctacttcagcatagaaatactatagttaacttttcgaattaaggagaagtactgcttagaaagtatattctattcgaagtatttgcaaaacttagtgtatagaatagcctcccatttaatttatactcactggaaaattctgaataacaacgcattttatagatcaatctcacttatagtaacccagtatattatacacaaaaaaacttggatcaagggataccgttataggtagcgcaacttgcgaaggaagtgtcaagtaagtagaatgtggtaagggttccatacaaggccaaagggacagacggaatccagtgcctatcgcaccaataccatgccgggatatcgtatctagcagctgttcgcgtacttgacagagattccacgtagctgtcctaactcagggtaggaagaacagatgctcttctatactatcgctagatttccggttcaatcacactagtcggaactctacccagtatacttcgttagagaaagcgaaagctgacatgtagaggaagagctcgctagccgaagtagacatagatagagggtctggacccgtctacttgaaagccaacagcttgtcgtaagtggggtggaaaaggcattcgatcaagggagagccggaagtcttataacctacaggcttacctatatccaagagagtctgccgcgaaccttcggagtcgatagtaagacagagaggcggtattggtatactagggcactcttactagatagtgtgaaggtcgagatccaaatcacagtctactaatattagcacaaaactacactgaaatagcgggtacagactatctttactcaattcttccattttgtttaagactcgccgttgaaagctagtagtgaaatacaaagtatagtaggtagtaattcgactagtattaggagggatagaacgctgtaggctgagtaggaatttgatttatattctaaaggtattcttaacagagtacagagggttctggctagatactaagttctcgaatactaaacgcttggttaatcaacagctttgaaacgttgataatattactaaagccaacgaaacttaaccggcggttgtataggtcttgaaaaggaaggataatatttaaagtaaaaggtaaatatatagtagaaatatctagttatcgatgcctataagcgcccaaaatcctaagattttaccctttaatgtggtaggtataaggatcgcccgcttgtaaggctgaagccacactattataaagggcttgaactgctcgcttttgatcctatagtattaatacctacttattgcagagctgtagaaagatattgctatcgcttactagccatttatttaactcttaaagctgttactgctcttcctcgagttatatcttctcggtagatttgacgacgtagcattcctataggcaaaagtacagatctagtagtttaaggaatagtgtagctaaggtgttgttatagtgtagaagtttcatgaactctaccgtaagggaaccgcgtatatacactggaacctatgtagtattagtgatctcgttcgtttataatcgaagagggcctgactaacctcagcttcgatggttataccatccaaagattactgttagtagctttgcgtcttattcttatcttctgcgttatgggaaatccgacgctgtctcttggccggtcggtgatatagggaaggtgaagttagatggtccatcgtggcttttggaatgaaatacaagggacattgtactcgagggtcttttatagccggcaatgacactgagctgctgtcattgctagccctgagttcgactgccttcaaaagagtcagtgaacggttacctcgacggttacctcaactgttaacgctcgatctcatctgctgttcaccccgaattactcaacttcatgcggaaaagagcaacagatgaagccttgaaacgaagacttgcaggaactacctcctaatagtggttcacatgtgtaatctttgaggcattaaatactatacatcgagtagtgttcgttgaagttggaggtgatgttgttgggtgcgaactatccaaaaggtggtgatatagatattagatatttccgctccaaatattgctacacagcaacagatgttgaagtagtgattatcgctcgctctcatggaccagctcggactttttttttctttctctcatttctgctccctggcgacagggctgaaattgtttgatcggagttatattctccagtccggttccgcatgattcggagatagtagttacccgatctcctacaacttccattcttcaagtcttctatatatacaccaaagacgcgaagaaaatgtggagatatctcaaaaatttattctctcgttttcaaaggcttaagcggcttgtttaacatcgaatccaagtcttctttcccagccgatcaaaatttctcccagatccatctaccgtctcttctgaatcggaatgcacacgacgatcagccgccccgtccccagaggtacccgttaacgaagatagtatatcacaaaaaggagataacagagatctcgatcggtttttaatttgccacaagagggttcttatggcagacttaaaataaactgatcttcagttccagagcctgtaagaagagtaacgagctaggcgactcggttatgatagaacgaaagtcttcgggtggctactttcgtataaaacatgcgatagtagcgagagaacgtaagtgattatatactatacacgagtactaaattcctttattaatgaactttaagctcgttactagaggtatatcattgatacagcccaactatagtggtttattatcttaagaagatcgaaacgactgattgctacagctttggccaaccttagtatatacgggggattgccgttagatttgcccctttggatagtctcttccggtttttgaggccttatcgggatatatagctatactaacgcggtagaatatactacttggctatagatgtaccaaaaaagcgaatcataagtttccgatattagcttgatctaggcgagtatctaataaacgtaacattcggttagcctatacttttagtcgacggctatagcgtctgcgcttaaaatataacaattactttgcagctaaagataacctctgcgctagtggatatatgaaaggtggcccttagaacagctggaagtacagtactctatctatctagaagtcaatcggtacagtgtttagacagtgatttatattatctgccaactagatacaccgcttacagtacagcggatcgcctaaaacttagcccgatactagttggatataagtagggctccaggctataataagaagattttctggaaacgcgtttgggataatatgatattcaaggtatagtctttcggctgaagaaatgtaattttaagtagtacctatgatcatataggaacagtgcaatgtatagatatttaagagagcagtagtcaggcaattcatctcgctaggtccctattatatacctgagcaataaagtctagacttagttagctaccaaaaattcctatcgtattcctaaaaagaggtttttaatttataggaactctggtcgcatttgaaaggattatatataaagtatatgtagtgtgtagataaatgatatacagaatacttgatatatcgagagctctcggttccttaaagcgaatgagagcctaacacgtacatcgaagtttctataggtaacccgcaacctcgccgactatactacctacagtagcagccggctattctactgatatatattcgtcgcaatagagcaacagtgatctggaatgagatatactgtagtacgtgatcgctttatatttgcaagtgctagatagtgatatacgtagatatgctattcgcagtttatttcatatcttaacttatatatatatttaatcaactaacattgttgatttgactctggtaatataggggctgtttaatctttaggaactcgtctttagatcctggggctatctcctatttctaggaaaccaagctctacccctaggatctctactatataatcctgattgaatacaaactggttttaggaacggattggctaggtttgggagctgtcgcgctcctgggaccctcctcctggattctagagttaatattctgccttcttaggtcgtggaaagccctcacaagacaccttcaccagacctgcgcacaaacctgtgtaattcgattactcccggaaaggcttagccatagccccaggagccgcacttgaggtttcgggaattgctaaaactgtcaacaggaacgtgactttggttccccgaggtgaaagtattagaccccagaagctatgtcgggcttcctgggggctacgtggctcccagaagctgcactaaagcccctgggagcaagagagctcccagggccaatatttgcattcccagggctaatggagctgttaacaggggcgtgactgatcttgtgagggtggaaatggagagtctagaggttacgtacgagtttctggggctatgtgatccctgggcagctcgcattattatcgggtcggcttttaaaaccttgacggccactaagattgatggatatttacgcagagcaggtcgttaactatcatcagtctactatatcaagctactcggcatactgctcaaatattggctacgattggctggctagttaaatcaatcgataagcatgctttggttccaattaggaaactagattggtagattatcttctcaactctgtaaagtccatgaccctactcatcgcacctctctaatgtttttggactatacctccatcattcttaaaaaatcatcattaagttgtgattgtttttattcgtgatccccgctgacttgttctttatagccctactctaggaagcagctcgaaccgcctctgactgttttttagctcggtacgcgtactcaaccagtgatcgcgtaagccatgtaaagcaagacgtaggagagacataatggcccctagaataccgaaagcggcctggccaacggctccataatacataatcttgtagtatggaaagtggctcgcactgtccaaaaattcgaaggatgtctgaaagccgtggacgtggctggccacataaccccccaaggagagaacgatcaagctcacaacgatttcaatgcaaatgtagtagaatcgagcggtgccgtcctcttgtagccacttcggatagatcacaaggacaaacccaaagatggaaaacagggctgagaccaacgccacaaccaccatgctcacgacaaccttatccatgaggctttgaaatgtgatgtccaaaatagagtcgctcgagttgacgaggtcagattttgcgcggtctcgtagaacgaccgcaaagcgtacagtggccgagctgagaccggcgagggccagccaagtgatggcaaggaaaaggatggcaagacgcagtcgaatcacagccctggtagtattaagaggcattttgtgtccgtaaaaacagttgagtcaataacaggaaagtgagtctggttctgttcagggcgatatatgaggaagtaaacaatgaggcaaaaagatgaagaacgtgaatatctcagggcgccgtgaatttatatgtgctatgcgcttttctcggtaagaatgtttcaagtagaagcactatttctatctttgagatccagggccacggaacccgtgtccgatccttggtgtaaagaagctctaggaatgacctcgtgtattcctaggattgaccgtcctgtgaaatggggccagtattttatcatcatctccaagatgggtgatggattgtgcatatcatatttcaagtcaaatagtgatcccagaaaaagttccgatacagacagattttgccttggtatttttaccttgagggacatattatgtgctattgattgacgaacttccgaacccttccacaggaagacaaattcaattttacttcgtttctgttgagcttactgaatttgttgccagctagaggatctgcttccaaccgtaaggcagccctcactgttcgacgaaccaacacggccgatcaaaaatcaattttgaaccgggaaatctgacaaaatcctgctagtggtcaggtaactaaaatagctcaaggagctattttctatgggcgaaaaactcatatgctgttccggttcagtggtttctttgttcaacgttgatgtaaacgttgacatcaactttctcacattattcaccacccgtacatctttaaaggtggttatcagagaataattagcggatgtttcagcacgatattaccaagctattgtagaagagtccaaaggcccagtgctgctggaagcacaatgatctgaaaacatcctacgggtggtatcataccagcgcgctactagcgggggtattatcgaggataccaaaaagccccagtactcctggaagcgcagtaaagactccactggtcgtcctttttactgtggcttttcggacggctgaaccatgacgcaatagtagcctccgagatatcggaatacaactccctcccgcatgtttctattcatgaccaactccaatctggcagccaggttgctcccgggaatgcgcttcaaatcaatttgtgggtcgggcaacatgtgaatacggcaaccggattaaaaaatggaatgattcgaccgtcattgaggcaaaatatcagcatccgcaatcctcctgggagccggcactgatattagtaaccagcgaaaacttgatagcggacatatatttcatggtggatgcttctgtgcctttcttttgttttagtaaattgccggtgcagtatcatcactagaaagaccaagcaatgatcatggatcatgagctgccaaaggtatcaaagaggtccaataccccagccacagaagagcacaatggacttacatggcaaactggtatcgttatcttagatcccctttgcgatgaatccatcggctgacaatctatttcatggaggcaatgaatcggcggaaaatttccgtcgggtcgttggccaatttacccatgggaatcacggccacacaagccaggctctacagccctctgttaaccagtccaccggatctgtggctacagaggtagctacttctgttgctatctctttagctagcccagggtcctacacgttgcctccaaccgccatcaaggctgaaaatcaagactttcccccactgaacgcaaaaaagagagcagccgagtcctcatttctcccacgaaaacaacgccgacattcgtactccatctctcataaaccgggtcgttcgcaaccgatacatcgaaagagtccctcaagccttacaacagttagtattgaaatggtcaacgacacaattcaatacctacaaacgctatccgaccgcatcttgatttttgacaccatttcctccagggagtgggccactatgcatcttgccacacgattgctacagagcagatacgaagatatcatcgccagggaaaagatggaaacagacgctgtgtccgattttaattccgcaccaacacagcaagaagagaagtgccggaaatgtgctgctgcagatgaggagcggctgtatgattgaggcgctttctgtgtttataaccttgctcgcaatgttttgataacatggtccttgaaaattgacgatcgaataaaatgttggggaaccaagaatcggtatatttaagaacgtgctgagcttcaagtctattattcatggatagagcactttcaggtacgaagatgggttgaaagttttcctgtaggtgatgtgagtccactcgacaagcaaaggtaaatatgtgacagtccggtgcatcttcatctccaatcaatgcaatggagattagaaagatcagaaagtaagtaccagacaaatcgaggattgaagcaatagcgttttcaaaagtcgagtcacctcgaataccaaaaccagccactctttgggttattcaacctgcttcactcgtagtaatgcaatggtttctgctgtaccatctacaagaactggaacatttgcgccgttctgctaatcggttcatgactgctggtccttacaactgcgttgatttgcggccattctgtgtctaagtgccagcacattaattcagatgcaccaataggacatcacttgtaaactggagtcgactctagtgttggcaagacaggaaagcctagagcctcgagacccagaacagccgtagcagtactattcggagaatcatgcgagggcgactcgccgtgctgaaaggcgggcttccaagccaaagtcatacacgaccataatcaaacccatcggattctctcccttcatctctcgaatatagccgttacggcgttaattagagcctggtcgcgtacaagtcgcgggttatcagtaataggatatatatgtgggactacccttgctcagcgcaaaaatgcctggcaagtttatcattccccgagcctaccgattactgtgataactatcttatgtttgatcccgttcgccctttgatatgaaaaattgaaaatttcatgaactaaacaagataagtgaggccatcattataaagaagttgccgcagactctggcttatttgacagcttgtgtcttatttttttctttcgcgctgtcagtcatttgaatcctaaattccatcgatgaacagcctcctattaccgataagcgctattatgtgtaacaagatcctaaggaagttgagttagggggccattatgttgagcaatgtggtcatgtgcctatttgtatagaaatcctcaattacctcgagactcatttttatgagggctgaacagcatataacagtcgcaaaggttatatatacagatagctgtttctatgtaagccccatggcttataagcctcttcttttgacaatcggtcaaagctctcatctcttctcattgacgagagtccaaaccttaataccgtgcgtataaataaattgaatttcacttcctctctttattcttgcaagtattggatcgggcaaaacatactcccgtcattatatcatctaaccagttcacaggcaatatgatatatgaccttaacactatcaatgctcaatctcagctccctatttcgatatcggcccccactacctgcgagagtcatacggcggccaccaagaaattaactgggtcccactgccgcagcaaactgaaggttgtcacggggcctcccaagagcctttatctaccccacttgtgtggtttggaaaacattgcatccgttttgattgtaagataggagtcgccgtgggatacctatcggaaagtcattatatataaaattactggcaaagtcactattgccacacgccgcacccgcccgtctcgcatggtagcaatccggatatatgcgaaagagaatactcgaagactgatatacagattcggacgtctggaacacaggaacgttctttcattacacaaatgctatatacacaaagatctcgcgttctttttagtggatgatttgccgctgacgctcgcgtatattgtcgcttttctatccgtttatcctaacgagacggaattgggatccatcgtaagccaggtttatccctttcgatgagctattctgactctttagatcctcgacggtgtcttttatttatttacgtttggccttgcgtaccaatcattaagctgtgatcatatattgtttggcattgacgggattatcaagataggtttgttggtggccgcatccttgcattatcggactaacacttcgcagcaagtttggacctttgtatagattgcacaccaaagcaatctgaagccgcatatattgcggcccttccttcgatcacaatgcagctcatgcagaaatttgacaaagatcaaggcgttgttggcgtgattgatctggagcgatggccaatcgattctgccgctgtgggttttctgtccgctaccgagacagcaggatcaatcaagtctctgagaaatgtgagttctcccagaaaggtatcatataatgctaatttccagcagcaacctctgttgacggggaagcaccgcccaagcgaggatctggtcgttctcgcaagagcagctctgctttccagtagtttgaattgcgtgtataatcccgattctaaaaagtgaaacgacaaggatatggttcacgactcttataaactggcgaattttcatcatgctcgtatctgtacggtttcaccaatgtgcaacgttctatgcgtctcctatagttctcttgctacataatagggtattttatttctttctggcaacccacaaacacaaggcaagtccgcagcgaagactaggaaatgggaatcgctttccaaggcgagaagctgtgatactagaatgggaatttgactttccactagcataggagcgtgtgccaagatagattgatcattacgcacggcgtacttttcgcgtcaagcgttctgttcctggtagctcacatggttttgtcgtaatccagtatatattataactgcagtctattctacttactggtataaaatcgaaagagaatctagacttaatatgaacaaaatgcaaaatcattttacaaatccaataggaagcaaagaatataaaagattttattggcgatcttctgtcttcggaataacgcccgaacataactaaaagtagtacttcaaagatgtctatttttcggatctgaataggctccaggtaggctccaggtaggctcagggtgggctcagggtgggctcagggttggctccaggttggctcagggttggctcagggttggctcagggttggctcagggttggctcagggtaggctcagggtgggctcagggttggttcagcggtggcagaaccgggtgtcaactccgatggggggaaattttgtgagttccccgcacggtattgtcacacttggttattcgttacccattaaacatcgctttatgttttgtatggtaagtcttaccataccggaagaaccgcgctgtaacatacagtaatagtgccatgccgactatcaaatctttcaataccggtagggtgttgatgggcctgagctttgtccgtaaggcgcggagtgtatatcgccggttcaaagacgcctgaagactggttcccgtcttactcgtcggtcgcaacctagcctgtgctgtgatgccatgctacagtctcaagattcggactcgcaatacatgactgcttagaggcttcggaaataacaggcaaacctatactactaatataggagagatagatgcactggtggcccgccccgtcagtccataaacaacaaggcctacgtctagctcggggcctcacgcaaaccgacacagcttggcgtgagacgagtattatgcttcatacgactacaatcataaaaataaaataaaataaaccatgacatgagaaacgaggttcattcgtgtggtgatactccgtaccttacaccaagagaataccctttactcggaattgaccaaatttttggaagcgaaaattcatcattcgtcttacaccgcaaagacccgctctacaaaagctaaacaggtctatagaccccaactaagatatatgatattgcacccctaaacctgaaccccggttataccttcacagagtgagataacggagaccatttcgtatctatgtcagcccaagggctgttttagaagagcgtgagacagttccatgcaccctttctgcatggttcaatagcatagactttgactccaacttctccccgcaaatagagcactcacagcgcatgtcatttgaaaacggcttgatatgcttactgacgaagtgtcggctcagagatccagagttcttgtacatcctcagacgttcgctctgtggcagcctaggggtactaaggcaaataaagtaaatcgttggtctctcttctggagatttgacgtaaactgaagcgatagctttggaaaaagcatcgtcgctcttagctgaaggggttgaattctgccttttaggcaggggggcagtcggtagcatatcgctagcatcggcggagcgttttcgggcgatacaagaccgcgagggtgtaacctcttctgtatcacagaccgcaattactgcattgattacagcaattcgacgctcatattctttctcaatcgtcgtacctggcatggtcaggacagtgtcgataagtgttatatgctgcggtgtcatatagcctgttcgctccagctcaactaatacttctttgttaataacctttccggaaagttgtcgttcgctgtcgaccactggctgttcgttcttgtaacgctccaggttctcatgaattaagtggttcctttgccgccctttctcattgtgtagttacttaactgagcgattatactgcttatctatatggtcgaatttttgctgtagccttttaactctcttctcttgagctttccgtcgcttgcggatcattcgggaatgagggaaattttcccccgaaagtttatcaccaaactcccgctgtaatgcagcccgggtattttcataggtgcgcttcttagcatctcgaatttatttccgcgcctgcttcctctcttctagagtgcagatacggggaattttattaatacagcttaaatcctctagttgatagggtctacggggatcaatagaccaactcatcgaggaggtaaaccgtatgagctgcttctaagcgggtaggccccgtacaattgcctgggcatctatataaatacctacgctgtagtgacgaataaaagtatcgatactagcatgctgcagtatcacgttctgtagttcattagacatatccgctattaaagagaagcattagcctaggatcctatcatgcataatgtctcactcacggctatcgttgaacgcttttgctgcgctatatcggaggcagtagggcttcgcgacttccgcgaaacctataatttcaccacctcgtttcattcggtaactcagccatcctttggtaagtttttcttctggtgcaattcgaatcccaccaggctcccgtagtgcttggcaaaacacgttttgatcgagaatttcgtcttttagctttaattcctgctcactaagaccatggaggacccggagacagtacagtttctcagggcaatccatcacagggccgtctttggacagacttttgaatgcaccaatcctgaagagcatacccagcagaaaaacatgaggactgagaaccagggtgggatcaaagatgatttccggaattgggaacgtgttcctattccaaaatggtgagcaagctttgactgggtccgttggcggaagaacttcagcatgcagaattgcgcagggaaatcaggggtgaattgaatggggagggaaggaagcaaaagacaggggacattcttacgactctttcccgccaagaaatgtttttgtgaattccggcctcaaataaatgaacagtcggggtcgtccatcatttggatctcgaactaatgtcaacttgaggtcctggaagcgaagtttcaatagtgcccctggacggttaccggtgatagcagctagctggcagaaaagaaggagttgtatccggtaccagccataaggaaaggtcatttctgttgtagatagaaccactcgtgtaaactcggccacatcttcgacatacatagtcactttcggtcgaccttttagagaaaggcttttttctgttacaactatcgcaagtacctattgaaagtcagcctagtcaatttttatcgatatagatattcaatcaggatcttacgtcacggatcttaatatggacatctttgctgacgccatgtccaacctcggccttgtagatcagatgccactacttccaaaatgcgtcgagcgtgcttttggtattcactcccgcggtgtgacgtccatcctttccccgtcgctggtcataccgctaggagaagagagccttgaggaagcggaccgtctcctcggtattagagagccagaacaaacattctaccggatcgcgcttcgtgcctttgcagaacctagaacaatcagcgaaccaagcaaggtagaagtttgtagtgaattctcactggtcctagaaatattgcgtatcatccaaatgcctttgggtatttgggctgtagcgtttctgtcgaagctgggagacatcaagagactcggcttcgtggaggtagtattctggtggaagttgctcctcttcctcttccgataccagctcatcttcggactcatcttcggactcgctgcttgagtcgaagacgctgggctcggtggaggaatcagtgtcggaagcgtggtccgaaaaaacctcagaatggcctggggtagtatcgctctcgttggacggaacagaaccatcaaatgacatggcaggagggggtggatgcgatcaaagaaggtacaaggaacgaggcaagtcaaagaacaagtaaatggtagagactggttctctcttcacacttgagtgccgtgccgtcgaagagaccgacctgagagtggaagagttgcttggtagcaagaaagaacattgtgtcggggccatggcagtcgatatttataaaaactgagggaagaagggaaccaaggaggggagccatccttggttcctctccttcaggaggatggctgagggtgggtcgcggcggcggttgctatagcgcgagtggtctcggtcgggcccaggcaccaggcacagccaacggaaagcatgggtggcagttgagagagtcggtcgtgggcttagattcacgtgatgccaagcccgacaacggtgagtggaaggcttaaaacggcccccgaggcggccgtttctggcctcccattcaccgtctcattcttatgtgtaggaatatatatcctacttaaactgtggttcctacgatatactcttataagggtattaaaagctacaattagattataaactatatctataactaccttaataaacttagaagggaaaaggaactgtacttccttattatccttatctaatatacttatagctactctaagggtccctctagttattaactaaaattactctatctaggaaagaactactagtaactagaaataattctccttaatactagtaggaacctagttctaaggttagtataagttctattagaatatagctaaagtagctaaaaagatataccgaattatatatatagtatactttcgaataatatatataagatttactatatagtatatcgatatagtactagattactaaagggaaacgataattatccttatccttaccctaatcttagttagatacttatatatataagagatattaggcctactaataaagaatagggtttataatagttttctaatatattccctttaaactaatagtctttactattatattaaggatttaatactattatataagtaaaataattagaagaaaggatttagagattatagaaaagtagaagggaaagggtagtaattatactataactataattacctactataaatctattaaaggaatatnnnnnnnnnnnnnnnnnnnnnnnnnnnnnnnnnnnnnnnnnnnnnnnnnnnnnnnnnnnnnnnnnnnnnnnnnnnnnnnnnnnnnnnnnnnnnnnnnnnnnnnnnnnnnnnnnnnnnnnnnnnnnnnnnnnnnnnnnnnnnnnnnnnnnnnnnnnnnnnnnnnnnnnnnnnnnnnnnnnnnnnnnnnnnnnnnnnnnnnnnnnnnnnnnnnnnnnnnnnnnnnnnnnnnnnnnnnnnnnnnnnnnnnnnnnnnnnnnnnnnnnnnnnnnnnnnnnnnnnnnnnnnnnnnnnnnnnnnnnnnnnnnnnnnnnnnnnnnnnnnnnnnnnnnnnnnnnnnnnnnnnnnnnnnnnnnnnnnnnnnnnnnnnnnnnnnnnnnnnnnnnnnnnnnnnnnnnnnnnnnnnnnnnnnnnnnnnnnnnnnnnnnnnnnnnnnnnnnnnnnnnnnnnnnnnnnnnnnnnnnnnnnnnnnnnnnnnnnnnnnnnnnnnnnnnnnnnnnnnnnnnnnnnnnnnnnnnnnnnnnnnnnnnnnnnnnnnnnnnnnnnnnnnnnnnnnnnnnnnnnnnnnnnnnnnnnnnnnnnnnnnnnnnnnnnnnnnnnnnnnnnnnnnnnnnnnnnnnnnnnnnnnnnnnnnnnnnnnnnnnnnnnnnnnnnnnnnnnnnnnnnnnnnnnnnnnnnnnnnnnnnnnnnnnnnnnnnnnnnnnnnnnnnnnnnnnnnnnnnnnnnnnnnnnnnnnnnnnnnnnnnnnnnnnnnnnnnnnnnnnnnnnnnnnnnnnnnnaatatatataaacctatataggcttaggaaggaatatctatattattatatatctattttgatatcgatccgtaaggggtttattatataaatataggtagatagatttccttatagtttaggaccccttaggggcccctccgagactagtaagaattagtcttggcatactatcaatacattgtattccctctataaagccctttatatcttacctagttgacaggctatatacctatataacgtatacctttacatttaccctactagaaataagaatagtttagggaattacttagaatatctaagattggtcatctgatcagttataaaagtagacgttaaagagaattttattaattaagatagctcttaaagctctaaattgtaatcgctttaaaagctagggggtgtatcagaatctaggataaatactgtcatttttcatccctgatacagttaggtcacgtaactgaccaagctggtttttctgcagaaaaactaacttagaaggttttccacctaaaaaactagtcccgcagttttttacctaaaaaacatcctttcttttattttatttattttaattactaagttgtctatcagattattatattttaggactattattagtttaagggagttagagattttattaagatttttctgccataaaatacactcgccttaccaccgtttttctgttatatagtaaattagatatataaatttaaggtccctactataagtactcaaaattttaaagggttaaaatatagttaagaggtagttatagtatatataagaaaattacccttttaggataactgaccttaaaatataagcaaattttaatcgctcactataggtataatctttatctaaattaaaagtagtaaactagatatataaatttaaggtccctactataagtactgaaaattttaaagggttaaaatacagttaagaggtagttatagtacgtataaaatatagccgaattaggttagtatcattcttcctatagccctaaaccttaaagatataccttaactttaaccacaaatttcagacgctatactagccggatacgaaagataagatatgatctagaatacttaagaaaagggctttctagtgatactaaaataataataaatagtcattattttataggtacttagactctatgatttcctatatagagttccagtgcagataaatgtgaatcaggatgttgctccaaagaaggatactgcggctttgggcctgacttccgcggagatgatgtgtgtatttcaggctgcgatgctatagcagagtgcggtggtatgttgatctcccttcacttggtatcctctggaaattaaccatttgaattatagaatttgccaaggtcactgggactgagtgtccattgaatgtttgttgctctgaattcgggtaagctatgatggtgaacttgaatcctgtttctcctttgctgattttataatttcacagcttttgcgggacaactgaggaaatctgcggaactggttgccaaagtggttgcgaccctgttaatacaccgtaagcatagaagacttcgctgaataggatctatcattctaataggagccatcgctcagatcatgtggtagaaagtcgagtgaggcccggtatattggatactacgagggctggaatacgcagagacaatgcgatactgtcacaccggacaacatcttgaacgcagttggtgcatgctcggaggccacaatggtatcactgtctggggacttcacccagtaaagatgccgagtttacctggagcgaataaattatctgaccccgccagttagccagctgcttcgggtgttaattttgggcatagataatttcaggtacctttcgccactgataggatctctgtacggcggcggtgggagttgcgataccctcacaaatacctcgggagaatcgcgtctcaagtggacgtctgggcataactcccatggcccaatgtaacatgcatggccttttctaaaacctgataccatcgacgttttctagcttgcgaattacggcttattctattcttgtatgcgtaataacactgctacgggaacatcactggtcaccggcacttggagatttactctgagtcacaattctttctctgagacgaaagactgcttacagaggggattggagattggaagatatgctcgtcttatgctactcgtatacttgaagattgactggcgaagagaaagatggagtgaaattaggctacgatgatcctgacagtaacctgatgccaacctccacatttgtgttcaagtatggggaaacctggggactcccagggaaaaacccgtaccaaggctgtcatagcaacagataatcatatccaaggcctttggtaaatatgtcagaatataaatttcttcatcaaaatcaggcgagtgagaagaagaacttacttctgatcaggtctgctttgatcctggtgcggtacacgtcgcggtttgcgaagctctcccggtacaatagacggctgtatgcacccaagaatatgtttgcgcaggaataatcgatgagtagggctgaagcgtagtgacgcagctgtcgcaaacactctcaggccctttctggcaattgaagcagtcgcttgggcgtttctggtcgtccggaccaggttggtcatattgagccatcgccgaggttgctagggcaatgagtagaaacaccagtctcattttggccgattcgcaacgcaacttctttttgtctatattagattgtactgcgaatacgtcagtatgttcagaatgcacgaacctttatcaaaggggatatcaaggtaagagtatagaaagcgatcagtttcaagtttagggaacaaaacaaagctcaaactacaattcgacgactggtttatatatatgcctctttcacattcaaagtatacattcagggtaagtgagttatgatgtaatatattcaggaaaaggtctaaggttggagactgagtctccgcgaaacttgtgttacatcagtctgccaaatttgtccagagcaaccagaatagacagcaaaggttctagaagtgtcattatgagagggctgtttgttagctgggtagtaattactaccaaagaaaatcgcgcaccatacttagtagcaaccaaaatgattaggtttggaatacagtgctctcttcattggttcatggtggagaagcatgtagtgacaagtagagctgtggagtatataaattgacaaggacacctgatagtcttgtaaatttggcaaacttgcaacctagtagtatggcagtattgcggatgatgcctacacaagtggagcattgcatatacctagggggtccagagcctgttttcaataagcttctcggtaggtcgtaaatacaattccaaatcgcactcaattaatggatccaagctcaggatcgatgcgaaatgacctttttttcgagcatttccattggcggccgagggatgcgacttgtaatgttacaaaacatgacagagcgccgcgggttccctatcagtcgttttctctacgctcaaccaattgtcaattatcctgttcaaggcttagcgcattccattggaatgaccggatatattctatgattcatgtctctaccacagatactcaaagcaggcggttgaattatcatcttacatccctttttcaaaatctctttttggttcctttcaattagtcatgatgcttctctcaattaaataacatgtacgtcagctctggagcatccagtaagctgcaagcaaccccttaatgactcttgactttgcgactcttcgttaaggaagtgtcatcgccggatctttaaggcggggaggtttattaaggttacatgactgctatccagtaggaagatattctcgaggctactctaggggcggtccttgaccggcaccacagttgcagtgtcttctgcgtggacctaccggttgcatttttggtatgaaacaattcgttgagttttcttacatgcaccccaactgctctggcaatacaacagcgcgtgttcggtaagtccgccaaaaccccaactctgcgagcgtctaacgcacttgcactacagaaaccttttgatgggttgattgatttagttcccctgcatctcattttcgtttcttcgtgcaacagcgaccagagcaataagcctgtcaacgcagatatcgatcctcaaaatctcctgctcaatggatcaggataaatgacacacacacgtacaaagacaatagtgcaaatgatggaattggggtagattttgtccatgattcaaattgctgtggttgggtacaagcgggaattgccgtcggaccggaccacccacgggcgctcctgagctcccgagctccatcacacccgtgcgctagaaaaccttgaaacaacaccccccgccttagcgatggccacactaccgcgcctcgctcgaacgccctttttcggcgtaggttaccagacgcttgagtgctcaaaagtatactctccacaatcacgttactgacaatgaaggcttcggatcattgaaactccggtaatcctggacagccgatttcgcaccaccttctactgcgccgttttgctcgaatccttcaaaacaataaatttgtttagttcaacctgaagccccgagcctggagcgccgaggttagtatactgtatactactatggtagcgatatccggaaaggaaagctaaacattctgcacagagcgaaatgagtttccggtttagcacgaccgcgtctgcacaacagctggccgacaacattccctaaggcttagcaatcctcaatcagaactacgagctagaacaatgatcgcgtgttccgacgcgaagtctctacattgcttgctgcaatcgatccacctagatgacgcccaccgagttaatactaggttcaacgacgctttgtcggccaaagcagcgctgcgcattgaatactggacttggaatcaggacatgtggtgtgtgttgacttcaagtcctcttcttgtatatagtcatgatcttggccttgatgcctgtggcgggtttatcgttataatctcggatatcacatcagagaagagggcagggtatgcctataagcagcttgctaaagacatacaagaacacagataaatcaagagcgatttgtcgataatgattagtcatgagatttagaaccctctctccgcgatattgtactgcaccgaggatatcattcaagaaatacgcgaaaatgaagactacgaggcgctgtgtcaggaccccaatactaagaaggctgatgcctgaagtatggcacctgtcatggtgtgtagagcaccccgtcctgggtgcgtgggggcctgtggactagacaggagcaatgcgtgctgcctgcacagcctcattggatcatgtgacccacaacctgtatattatcctcgcatgctgcttctttggggaagtagctattagttccaatataccactgcgtatactactatctctatttcccgatcctccattacatataacattcccttaggcatttatacctaggggtctcaccaaattgtagacatccctgctctttccaagacactagcctaagcaaatattattcccgatatgatcagaactgatggaaggattatcatttgaccttataacgtgccaggtggtgaaaataaaagttgaacacttgaactctattttttaatgggccctagccgactgatgcggaggaatgtggagctctcccgtgatcccttggagccttgaaaccctctagattcctcccatactatgatctcccttgatttgtgaataagaggggggaaataagccatctgaatactttgagcgtagcatagatttggcgcttgttaataggccttgtagtgctcaacgtagaacggcatgaggattccgcatggattattgttcgtttcgtttcgtttctaacataaatttacatttgaatattgaccaactttggtgtaaaatggacgagcctttcttgcagcaaggagcatatttttgtaatgctttttgtactcacgatacaggaacggaacatatggggatcatgtaacattcattgtttctatacggtaagcctactcaaaacttggttccaggagataaatgtggcatatatcttagctatagtattactcttataactattttagttatgccgtcatcggatagacagtgccatttgaaagaagctgtgagaggaagatttcataactaccaccagagtcctctccctacctttgtcggcctttttgaacagcaattactagtgacaataattcggcttcttgcttctgatcttcgttgaggattagcagaaaatgtgaaataggtaacattaattttaaaaatgaagaaagctaaggaatgcaggaaggaatctcctattttggataatgacgcccactgtccactgggtgacgagtcatggaataagatgtgcaagttagcctcctcccaatgcagccaagtggccaatgtaacatatgcactacgagtttggaacccgcttaagcactgcatatggaagggcattgcctccaatatagccaatcacgctatatgtttaggatcacgtttatttgttctctgggaaagtgtcatgcattgtatgcagcggtcgttttaatagagcagcaacgaatgtttagtggaagtttgtccaccttggtcgactgtggttggaaactagtcatgaactagtggtaagacgttcccagcgcgtggtaggcgctggcattatttacccgtgcgctatgttgtatgaccctggcttgctatagctcctaaacatgtgacttccttggctggagtgcaagggtcgtggtcatcaacccaactagtcgtaaggagcggagtagaccattcgtaaagaaattctttcaaccggttcccaaccaggtgatctcttgtcactacatcattcactgtggagcagatgttagtttggtatgctacccatgttgttcgaagtcatcggagcagctattaccgttattggggctattatgtgtgtttaactaagcgagagagggggttggttttccgtatttaaaatacccacacatttagctattgaggtagttttactgtcttaggcaggacaggacctctctccccccttctctctcacggtcaatctacccagttcaagatcaatcatagagacagtaagagatataacgcccaagtcgagatcaatatgcctgctgacctggcaggggtaagacagaagggccgcatcggtggacgagcgatgaagtcggtcaatatagaaaggtagtttagggtgaatcgtccgtggattgacatgcgcaaaaaatctcccacttaaaattaactggaatctgaatcttatcatatggtggttggccaacagctctttttccgttgataaatctagaaggtccagggatctgatactctagcgataaatacacaatcattccctgtacgtctgcgcctcatttacctacttacgttgtatccgaacaccacggcaaaaaaacaccaatgtcgaatttactctgtagagaactccgtagggctggataagtctggcctggcgcgaatagactgtcgccgaacccagaatctgtgaaaaagaccttcggggtattagttgtcggtcatacgaataaataagagacagcacaactgcatgataaagggcgaagaaggactaaaaaggaaatactcacagcattctaaagaataaatattaaaaagcaacttgaagtgccaccctgaaatcgatgctgactgggacattcccatcttgaccgaggtctgtaaggcttcaatagcacaccaagcagctcttgtacatgtgcttgagcctgatatttcaactttgacgtcgttcaagctggaagagatggtttgcacgtttcgggtcgcaagagttgatctgaggggcctgaagtttccacacagtaaaacatgagcctgacgatatagggaaagcgcattcgctgtaatcaccccgccggggtatcttggagagcaatggaagtctgggatctgctcggcgcacatacgccacctagccagagcttgttcaagtcgttgcgttagtgcctgggtctgatctaaaagccaactatcctggtagagatttgccagtggttcaacgatgccatgcaaagtcaaataagacgcaaaaatgctcagtcgaagcgagggcccactgagaggagaaaattttggccattgcgactgagaagcgaatcagcggtttgaaactggactttctagtctcggaccacgcctgtggggatatgctcatccgttcagattcttcgcatggcagaaaacaatcacttatatcaacattccaagagcagttaactgtttggaaggcgacgcctagcgcacccagatagacgtatatcgagcaaattgctctgtcaggtgacgttagatttgtacagattgtccaagataagatgattccacataccgcacagttgtctcaaagtcaatctacttctgccatcgtcgcaaaagatcaacgtctcctccgtctgactctggtgcgtaggggggcagctttctgcgttcaaaatgccctgacaagtcggaacattgattagtagctttactggagtagatcctccgaggagtgacagtgacaaaatactgcataagggcaccctctaaacaaaggatttttctacttgtcacaattatctcgatcagaagagaggctaatgacgctgcttcttggaaggtccggaaatctccactcttcgtaccgtttgccataactagaagaagacactgcagtacccatagctttttatctgcgatagtgagctggctcagttgaacctcttttgagtcagggaacatgcttcatcaatgggtttgccttgcgtacatatttgattgtattggctttagacatgcgatgaagcgaagcagcggttagctcatcgtcgtagtagatggcgccgatggatgccatggcaaaaatcatacatgggggagctaggtctgccttctaggttgacgtatggatacatggtatgtatatgaggagatgtgcttagtactctttctaatgtgaagcgactcggaaatgtgaaactgatgatatcttcggtctgcaggaatatttaagcactgtgggctgggagatccagtacgggcatcggtctgcggcttaccgacgtaggtgtatggaacgcggaacctaatttacgccacctgtgctccgagatggcaaaagagcctttccatgctggtgaatctattaccctcggtcgtgatttcgtggcagcatgatgctttgggggagaagcaaagctattcaatgccaagtcggattgcaagttttcttgcgctctctcggtcgggttttatacatatcagactcgaaagatcgcggaaagttgagagctgagatccaagagcctatggtcgggctattgatttccaacatgttagttgggtcgaaggcgggaagccaccctgtagctgttgagggctcaaccgcattttgcattttatgccgtcaccgataagatcgtgggactggatgtctgcatgaatattgattgtatggactctgacggatcattattgacttcctgactatgttgttgggttcccatgtggttccgtgaatggtgccttttcaagacatcttgccgaatgaagcttgcattgcaaggggtacatctgaacgggtgctcattgcgatctggaaaacatctggttaatatctcgggcaccgaacggtttgacggacctaggagagcgctcgtgtctgcaaatgtgttcccgccgagcgaatgcacgatcacagtaggagcattgttttccacggcgcgtaacgtcaggtcccgtagtatcactcattctcgtttattgacatgaaattagaatcgcccctagcatctctcattcccagattttcgtgttcctagtcttcaaaatcatgacacttgaaaggttaaaatacctcactattaggtgacaggaatgacttctgtactgacaggggccgaaattgccaaaagtacgtctcgtcctcatagaaagaaggatggccccgcttggttttctcccttcgcggatgtgtaagccgcgtaagccaataagatcggacagattaaattaatgcctaagatataaggcactgaggtcacatgctatctttattcctaccgcttctagcttcctgcattcccgttggtcactttatgcctgatattatcattggtctatttcctcaccgctcacgggtaattctgccagtcccatcaaaattcttggaccaacatagagtggtggaagcttgtacttgaacaaaagttttaagaatgtgcacgtatacaatctacactgaaaataggagtgatcaactaaggtaggcactgtgtaagatagatgatgatctagctactaaatggcttcatgtggacgaagacacaaatatcgtctcgtttgtaaatcaggagcagtatgttctacaaaacaagcaaggagagatatgccaacagtgtgcctgtaagacggataagggaaaaataagttgtaaataagagaggcagcgggtgaagaaaccaaagaagtctgtctgccaaactgcgtgggaaatagcgaacgcccaaatgcatcatgggtcattcataatgaacatagattctataatacatcatcaggctgataccagatattcaagccggcattatcaagatcccgctaatctagcaggtggtgatgtaaagaccgagactagaaaggttgttaactaatatccaagcagaaatataggggaagggaacatacggagaggggttgtagtcttcgaagaagttaaggtaggtgcttccagagttcttcatctcgaaggcgacagtctggccgccaggacaagcgaaggtagagatgacgtatgagttaccgggggaaacggttatgtcgccgaggtcctgggacacagaaggcaggttgttaaaggtagtagactcgtcgacagcggaagagagcttagcgaagtcgatctttccatcaccgctaaagctataggacgaagtctcgaggtcctggagctcggggaaaaggaataccaggctgcaagttttaccggagtcggacgagggaatgtcgaagttgaacgcgctcgaaatggtggagctcacggtaccattgtaggaagtaccaggcgcagtgtcaggcgaggaggagtcaacagggacaatcaggtgggggtattcgtagctgccagtagtaagagtagtggggcaagagctgctagaggatccagtcgctgtagtagaagatgcggaactggtggggacagatccactgttagaatcgctgggctgtgagcctccaccagcactagatggagaaggaacagagcccgtgggaacagatgcggtagagccggagccagagcccgtggccgtgggagcaggggcggtagagccggagccagagcccgtggccgtgggagcaggggcggtagagccagagccagagccagagccagagccagagccagagccagagccagagccagaacctggactggacgagacagaagagaaggttgaaggagcgctggaagatccgacagaagagggagcagcgctagcagatgacgacgagctgccagaaccagagcccgagtttgaacatgagtcggcagtcaactccacgttcacgcaaccggtgacatcggacttgttgggggcagtgtagacgttcagaccaccgttttggcccgtggcacaggcaacaaagtccttgctaccgttgtactcgagctcaccctgggagctaagagagaagccaggagtgggggaagcaccctcatcacactggaactgagtagtaggggctattcaatagtcagacatgctttagttgacataagttgggatggtcacttacgggtgagaatgcagccacggccgtttgagtcagtgatagcacctgtagaatcgatgcagtattgagcgggcgacaggctgctgtctccaatgcggttctgaccatcgcttagctggccaagttcgccggaggcaccaccggaagaggtgaggtgaaagcagcagctgtcgctacggctaacgagggcgttggtgctggcagcgaaggcagcgatggtgatgaagttcttcatcatgattgctcttcggcgaatgtggaagggttggtaataacgaatgaacagaatgaatgttcttttgaggaaattaattcaaagatcttcgagtgtgatatcgaccacgatagttacagcagaaattaatctagaggactcggttcgtggaaggcgcatctttatagaatgcagtggattagagatccagaattatgaatcaaggaattacatgttctagtaggcggcgaaactctccgatgcaaaaacaaacaaaaaatagaaacggcatgctgtcaggcaacctggcaccatgtgagtgaattgcaggtccgaaccagccggagcgagatgtggtagaccgtagtgacatagtaggcgctgtctaaaccagatatccatttcattaaattgtggagtagaaggccatgcttgatagtccacttacaaccaaacttggacatggatgtggacccttctcaaggtccatttgaacctgctatccacggtgcagttgaaggtggcaaaccaccttttccatggatcgttcgtggttgcattctccgaaaggctcagagtggtctaccttcggatagaacggatgaagttatatatcttcggttagagaccgcgggactttgcgagattgatcgaatgcaactgttaacaggtgggcagcattacatggcatggtaccccgatactgtcttctagctttggacaaaaatagctaagcataaacttgggtatgcttggtatactgccgacttccagccaacagaaaggaaatagatcgctacatacagggctaaaaggactagaccacgtcagtgataatagccgattcccgaaaagtccctgtctctggataaaattagaataagatattgagagctgctacagtggaccggtggaactgggacttatgcatcgtatgtaattggacatggacaagtgtatgacctcaagacaaatttcaacaacaaagaagaaaagacactggatgcgaagcggtttttaccaagtggagcccgctttattcaacaatagtcgcggctctctttgttccttgttcaccttgttcgccaccaccaatcatagttagttgctaccttgtgggagttacaaagtacattgtttggtttctgttgttcgtttattttttgtgcgtaatagttcacgccccacgatgcgtgtctttttttagatctattccttagactgacgatcaaacatcgctctagatcgatcgcaaacaccctaccatattgttttagacaaaatgatatcaattggaattcggacatattatttgatatgcatattgggtggttagcaagccttccccaatgctctcataaaaccccttattgtattgctttgttcaaatatggattccctggctgttggtcgttctaacttaaccccgccatgtcgatcgcactatggcgatcgtactatggacgcgacgatgagccaattggggagtggggctccatataatgacatacatctttacataaaattgacacgtcgtgcgtcatacgatggtgatgtcaatttcagattccataccccgtactccgtacatctaggtatatccacatccacccctttcgactccacaaagacaatccgatagcactatgctgtcaaagacaactactttttttccaaccgcagctgctatcaaggcaggagaagcttcaacacagtataacgatgctattgactggacggaggatgttgccaaaggttgctcatataacccagccatatcacaacttctgctttctatggctgctattcatacctcagtggacatgctcacacaggtccttcttgacatccctgcgcagtccgacctggtcagagctctgcgggaggagataataattgtgactcgggacagttaaatcaaggaaattcaacgactgaaggctgtcacaattaggaagacccatcatatatttccgcttttttcaaatattgactgatcctagccccgatgccccgtcttaccaccaccgacgtttgagttatcagatggagtcttcgtccccaaagactcttaagtcttgatctccgtggatagcatgtgggacgaatgtaattatgaaacctggagaagttcgatgttgatcgttttctctagatgcgtgatgttcccggccaacagactgttgcccaaattgttgcaccttctccgattcacttgggctggggctttgggcagcatgcctgtcctggaagatcatttgccgccaacgagacatgcagctatatgaccggacgattatgggcagtgggtgaatagtacaggctctggaaacaatccatggcgtttatttcggcctttacattacccagaagcctgtcgctcaaactgtttggggtgcgatcctatataagatcgattccaagggcttcttcaagatgagcactagtgctgacgcacacattatccagactacataagacgaagaaccgattgacctgggtaatggtgccaatatgcatgtttcatgaaagaggctacgggatacgggaatgggcgccacagatgcagaaagataggggtgcaatgaacatgtaccgttatgcctagcttctcaagggtcagctattctaaattcacctgtgaaaacaatgtcaaggaaagtagagaatgttcggagtcatgaatctatatttaattacattttattccgtgtttgaagcctattgatatctaggtggttttctactatcagatatgcaactattatgatcccatgccaatcagacagccgagaaaattatgaatgaatttactgctctttctgtcactttttcattgttgatgggtacatacatccaagcaaggcagagctgttcaagaatgtacgagttgactacttctacgaaggggcatagcgcgcaggcggcctccgtcgatatcaaaacattcctaccgaggaatgccgaatatggtctaattggaggaacaacaataataaccggtgaatttgccgagcatttgcaagttcttggcctattggcctaactattgtagcagcatatatatgatagctaatcaagatatccctcgttggtgttcttttttaccaatgtccgatcattgtcgacagtatgcaaatatataataccttgctcagcggccttgctatccttccgggagctctagcttcctggcctttcttggatcgcaccaaagagatatcgacaaccatctatcacaatgaccagcccaatgtgaaagtcgagaccatctttcaatttcccaacaatggctcatggattgataatatggttgttcgatcagacggcaatcttctgttgacgcgtctggacacccccgaagtttggaatttcgacaccacaaccggaaatgcgaccctcgcctactcgttccccaatgtcaccagctgcttcggaatcagtgaaattgaggacgatgtcttcgcagttgttgtgggcaatttctctcccaagaccttccagccaggcccaggctcgttctcggttcataaattggattttaccaagatcgatgctgaggataacgagcgcgcaccgaaattgccaatggcctcggaaatcatcgcgatgccagaggctgaggccctaaatggcatggccactttctcacaggggtcaaatttggttctcattgccgacagccccaagggagtaatatggaaggtcgataccaagacaggagactattctgtcgcactggatgataccacaatggcaccggcggagggtcaggctcttcctctgggtgtcaatgctctgacaatacttggtgactatgtgtactataccggtacaacacgaatggtatattgcagagtcaaggtagacaaagatgtcaaacccatcggagattttgaggtcattgctagtggattccttcccgataacgttgagatgaccgaggatggcattgcgtatattccgacagctccgcagaactctgttgtgcgtctcacgccttcggggcagatatccctcgtcacgggtgggcaagtatctacgcaactagcaggtccaagctcagctcgattgagcaaagaccgacaagtactctatgttggcaccaatggtggccaaattgcgccggttttgggctcattcatcgagcccgcaaagattgtcaagatctcattcgaaaaatagggaaagcctgatgcttctagggacgcttggaataaccattgtggacattcgaagttgacgaacgaaaattgatgggaatattgggtttctcggccagcttgttgtataattcgatttatgaagcattctattcttgaacacacgtgtctctctccgtcatcgttcacattccagattgtgtgagcaaaggaatgagagcctgcgaaggtatcagctttgtctctgccttatggtcgaaagtgagatagtatcctcactcaattgtatcaacccaatgttgtggatcttcgcacgacttaactcacgatctcgagcaagcgatgtaaagccggcctgtatataacagtataatctccaccgtatatcctgtaatgacagcgactctgtgatcagctatgccccgaagttgggctactttgacccagctgagctcgtgagtgactttggtctagttcattgggaattgatcaggagtatagacgaagattgcgaacttgtttcccgagccaaaacctataatcgtgatacatgcctttcataccagggagctgatttcgtccatgactccatgtggagttagccaaatcgaatggccttcataggcatatggtcaactcggagagtatcggtgaaaggtggcaaactgcgctaaaccgatagttatagtggtgtgcaccgcaatgtagctgttcgaagtcatgtgacttctctccaacaactattttagtcccagcagataggtagtttcctgacggaaaaacggtggtaaggcgagtgtatatgtggcagaaaaatctcaataaattctctaactctctaaaactgacaatagtcctaaaacatgacaatctgatggacaacttagtaatcaaaacaaacaaaacaaaagaaagggtgttttcgggcgaaaaaccagcctggtcagtcacgtgacccagctgtatcagggatgaaaaatgacagtattcatcctcgattctgacatttccttttctctctttacgcaattcatgagaactttccagagcgtctacatttcatccgtagactcctagattcatctccaatagtagcaatggacgaagaagctcacgatagtaagaaccgtgttgacctgactctggtgatgtgcttgtacctcaaacgactgaaattccaccacgctctctcgctgaggttccggacagtggacacctgaggtagccgcgaaattattagctaagcagtgccagccaatgacgtcatattgtgatgtctccccacgtaggagtaacgtagagtaacagcatgttgcagccttacaggaccagtttctcttctatcatacactcgaatttccaatatcaaaatgcctggacacttcggtcaaaaggtcctcaataccttaggtctcaacgaccatggcaatcaacaaaactcctcggccgtccatcttccaggcagactggctgtgaacaacgacgagcacggattgtcttcacctcctaataatggcacataccctcgtctctgcaggctctcagatggcaccatcctctcgtcctttacccgattccccgatggacaacgctcacttcgcgtcgcgaaaagtaccgataacggccgcacgttcgaggacttctccgaggtaaccaggggcgccggcgacgtggataacatgttcttgtgtgaggtggcgccggggacaatactagcggcctttcgcaatcacgacaagggtccaaatggccccacgtacttccgcatcaccgtctgccggtctacggacggaggtcgggtctggaaatttgcttcgcaggcagctgagaaacgccctcccttgggtatttgggaaccattcatgcgcgtcggacgccaaggtgaagtgcagctttatttctcgcaagaatttgcacataacaaccaatgtaccatgctagtcgtctcgcgggatcaaggaagtacctggactcaaccgacctgtctgcatggtgacaaagatcctcttcgcgatggaatgtgcggcattgcacgaacttttgataacggtcgcgaggctcttgtcatggtattcgagaccacccggtacggacctttcagtgttgaagcgcttatatcatacgatgacggtgccacctggggttggcgccatgaagttttccgcccacgaccgggtcataatgcaggctctcctcaaattgcctcttttgctgatgggtccatggctactatattcatgacagatgaagattccaagcacgtggaatgggtaaagaatgcctctatcaaagtcgtatttgctggccagccagttgatgggcgggttcaatggagcttgccaactcttgtctctccggcctccagcttctggcctggaatcatgacattggatcaccacaacgtgctagccacttatgaccgtggtggaccccttgcaaagactatcacctggcaccccgcgtaaacatttgatcccaggggtaccttctatctagcgagagtctgcgactgggttctagggttttcatacacattctttgttgtctaagtgggtggcttgtccttcgcgtgatactttgctgggcaatctccgtattccccgcacattcccagtggacttgatagtcccaggacatgcatggatggatagttgaatattattccatctcttatcaaagagcacacttgtactccacagtccactcaacaataatacgctgtagcatccatatggtgatctctctttcaagtcagctttttcgctgcccacctggcagtcaatatccgagatcggcctcacctcaccctgactcgcgtgtttcacatcggatgccgggccttggaggtggcgttcggttttcggcggatataaactatcccggtggctcgggattaaccgtatggggaaattgatctcggagttaatctgataatctgatcggattacaaaaagggccagtactatttatgtataaaggttcttctgggtaacgttggatgttcccttcaaaacttcatctttcgaaatgtcgaccccattacggaatattattgttgttggcggctcgttcgtcgggcgtgtgggttcattctgctgtacaagatgaaattcaactaatggtcaatacagatgacagctcaggagctagcatccattgtgccttcaacacatcgggtaagctatcactgagatctaccttcgaaaacgaaactaatggtttgtgcaggtcctcttgactgagccacatagccatttccaccaccttttcacctttgtaagttgacttcggtaccagtgaacgttcattccactaagccttcgcagctaacatgccccatagcctcggtttgcgattgttccgggtcaggagcacaaagcattcattccgtacagtggtatcttcaaggcgtcgcccaatccctccaaccatggcgtagtccaggctcgcgttctatcggtcaagcccaatcatattgagttggaccgtgaatggcatggctcaaaggaacttccttttgactatgtcgttcttgcgacaggcacccgtctctccaagcctgcggctatggacgatgatgataaggcatcgtcagtcgagtatctacaaaagcatcaagctagcgttaagagatccaagtcgattttgattgtcggtggcggtgctgtcggtgttcaaatggcgaccgatctgaaagaatattatccagacaaggaagtgaccgtggttcaatctaggccgcaggtgatgccgaacttccactttgggctccatcaccttattaagagacgatttgatgagttagggatccgactcatcactggctctcgagtcattgttccaccgagtggatttcccaacgatggtagtaccttcgatgtccatctcacaaacggtaacaccgagtccacgcaattcgtcgtcctagccaccggacaaactccaaataaccagctggtggcagacttgaagtcttctcgcccggatagcgagtcggtcatcaatccagagaatggatttattcgcgttagacccactatgcagttcctagatgaagaatattcgaacatgtttgctgtgggtgatattgcagataccggtgcccaaaaggccgctcgtccaggctcaatacaggcagcagttgtcgcgaagaacatactggctttaattgaaggacgcgctgccgagaacacttttgttaagggacctggggccattcatttgacactcggcatggtaagtcaatcaaccctttatggagcgagatttgaataggctgactgttgttttttagaaacataatgtcattttccgcaatcccgatactgtggatggtcagacagagccctggatcaagccaaaggatgagtaagttccttcaattccttatgccacgccaggagaagctaatatatttaccagtggccgagaggatctgaatgtggaagctatgtgggagagactgggtatctcggttgagaatcctcgtgaatatcacctataatcgatcacgatgagtgaaagaaagggaaattaatgccacagaggtctataaattgcatagggcaacagcgaacacgtcagaaactatcatatattattcacatccagtaaccctatcgtgcgaagacgacccgagtttcccgtggatcgtgtcaatatgaagaaattggaattgtagaagatcacaacattctgtttaattgtttctctggcaggcagcttgccgttcagttttctgtgttgccagcctctttgtgtgcctgcagagatgtgggatctgtatagagagattataatcattcccttagtatattgctatcacggacaatgcaaatcgtcgggccagcctagttgtttattatcagacagcataggttgattcttcgcaaaccatttgcagtgtgccgttatttgaaaatccggactaaataataataaaatcgcacatttaacacaccgcgatggaaatatctatagtagaacgacttcaattcactagaattgtactatctagacttgggtttgggtagggaaattcacccacctgatagcaatgggttcagctttggtgtttcataaaatatatataaccaggcaagtcaagttgattctcggataagtagactgcaaggggacctgccaggctcgtgactggttgggaatcaatagttgttctgctacgtctgagggcgaatgagaaactattaacgtgaaatccagtttgatttctgcttcgtgccttgaatattcgtgccccaggaacgtgctaagaatttccaatctggacatcgggaaggagctatttccgacgatgcggctttgttcctgatctgcaccagccttgtatccacagtgcggaagaagaagaatggagcttataggtaggtctactgcatccccttgatccgtcttgatccaagtggacgtgcgagcagcggccaaggaagaagggaaggggaccttggcaattcagcccacacgggtaaagattccgtgcctatactccttctcatttgcgggtcgggtggaatagggtaatagtggcgtctaccttgtccgaaattcactgctatctttagtccgatagaaaaggtcggaccatcgtgcacctaggccgtgttttctagtgggtcactccgagttctgcgcattttccaaatctgtgcaagatcctcggaaaaccccatatgatgtcgcttgaaggaacgacatgatctgcgttagagtaagagtataaggcctagagggatcggaagataaatagtcgccgatggtaattgctggtggatatcgatttccgtattgagtgtgttgtatgcattatcactggcatacctagagagcaggtcttcacaacctcaggaaggaagatcaattgtgtttgctagtgcgtcgaggcattgccgggatgcacctgtgaccttgccagacctctttgccctgtttgtgatcctttgtgctttaaggcctttgttcctttatgtctatgaaattattagagacattcacagcagtggttagatcgccattaggaatatatattctgttgatcacttctcatttactcagccatagagtaaatacagtctacatccatcatttactccgttgtactccgtatggctttgctggatcacttagcacctctcatcaagtctttcttccgaaacaaggatcggcaccgtcggggatgtgaggcaggtgggtttcataggcaccgctgtcccttagcggcgggctacggtgggcgatgcggcgggggccttataatcgccgacccactccagcccacgtggtgcaggacgaagtgatatctccttcgcttgtgtttggaaaaagagtgacggcgaaccattaggctattatattctacagggcaaagcggtgttttcaattataaattgagaaagattgtatgattcagtatgaacatgacttagatgactttggttcacatcatcttcaagagaacgagaaattcagactcgagttttccatgctcctccaccactcattgtaatcacagtcacagccactttctactgtgaacaagaggtaacaactcatgccctgtaattgatggtcacgtggcaactatcgcagtttcccgtgccaaaactgccaatccccacgtcacagctgtccataatggtagtcatggtattcacgatgtcttggcctgagataggttggtctccgctgccgttggtcgcgtacttcacgtagcagttgcctttgctgaactcggtaccgtcggtgtatgtcgccgaagtatcgatggcattcttcgcattaatgcagttctgaggaatgagggcaatgcctgctgcaccggagccctcacagctgcgtgaattgtcagtaattggtgggcttgaagttatagaatgtccactcacttgttgttgtatgctacaacgtgaacccccattgcgacgaaggtcgccaagatctttgaagcgtgcatgttgacgaataattttgttgttgggaaagatgtgaaggctgtcgagtgttcaggagtgaaacgaatttgactagtaaaccataggattcaatggatcggcccatgctttatacccgatagttactacggcctcctatgtcacttttcaaaacgatcgccgcaatctttcgagttagaaggtatgccgaatggatcagcatccttgtctactgactatctctaagcaagtgttattgacccattcgataaacacacgtgtttctctcgtcaatctaccgtgctaatgagtggagacagacggagtatatttaccatccgtgatatatggtagtctgtttctatcgttaaaagtctgcgggatagacggttacattcgccactccaggctacgtggatgtctactcaccaagccactgcgtcacctttacccgattaggaaactgcccttgggaagctcaaggtatgacatacgtattgcggatagcaggaatgacccattatggccttgagtgatcatatatccttatagatgtggtataaaaagttgccatttctccgacctttacttaacttcaacccacaagtgtcaatcgcaaaatccatcttaccatcttaccatctatcccacatccgtgaaaatgcagctctgggcttatctccttcctgtggccaccattggtcaagtagccatggcctacagcagcaagtaagtattacgtctacggcacctatctgagactgctggtttctaacaatcttcagctgtgaggggtctttcgtccttgacacggacctggtttccattgacaaggactgcgcaaaagccatctccaatatcgacacatcggcaacatacaacgatggcagtcagttcagtgagggccactgttatctggtctatgctacaaatggcagtggtgatcagcctgttagcggacagacgattcatgacgttgcccagagcattcttgatggctgtgcaaagaagcacgggagctatggaactggaaactgcgatgcctgtcatgtcactgtcaattaccgatcctgagaatgtatatagaacttcagagagatcgacgcgagatttccgttatctgttctcttttttggcaaagatgttaaatcagagctcgaaatgcacggtatacacttgaattttgaagtgaaaatttggttcaactactgcgcgagtcctcgtgcgcgtagcaaactgttgttgacttagatcaccggtctagcgatattgtaagcaatatatctgaatgaagttggccttgggatgggtcaatggctcgcagatgactttaatcaagtaattaggtggaaattttgttataacaagtgtttctaaaaagtaaattgatttctgcaagatttttcagatgggttgggtttgcgttttgttctatacacaatatatctcatttgagcgctgttggcaaagaagaaacactccagaaaggtcaaattacattgaataagctcaatttccccgaactacatctcaaatcacacaatatcatcagcagtgcttgattccgtggagctctggcaagttgactagagttcctcagtctcgggcttttcctcgtctggatgattctaatgagaccgatcacagtattttggaagaacaaaggagcgctatccgagtctcgatggaattgcccattgataaaatccccaacgtcaagattattcccagctgcactgcaaagatgcttctcttatgagtcaatgtaatcggccttcctcggaaatcatactgaagtttgaacacatagcatgagataaggaaagtgcggcattgtatagtgaagggtatcagttcttactgttacgcttcgatgtgaaggggaacccacgtgctgggtggcattcttgatttcataattcaatctgtctcccgaggtccttcggacagccctaagccggattttgagacggtgtagtattaagacagatcggcgagctttgccacgtccgcgtggagggctaatggagtcattgcctcttcacgcttcaatcttcgttctgaataaattgctggagatcagcaaacaattccacttcgacagagaaaccaatgagtatgatcaagtttcgtgggggccatttagtttctacgtcattgctcatagatctctccactctagattagcttctactctagcaagtagtctgtaatgacgatatcttccgtattaggaaactcctacggctgaacttactagaaatattcgcaaattaggactccttaaaatatgcacatgtcgaatttgccactcaggggtctttcctgagatatttaaaatgtgatgtgggtgactggtagagccaagtttcccttcaaaaagacgaacagttgttattgaaatagacgttacctaccggccagcctgcagcttctcctccaactctgttgttcaaacctttcttgttccgcaaaccccattttctcgagctttctacgatgcaacttattgcctacctgatcggagccgtggctcctgcaatgttggctatggcttacaatgataagtaagtttacgtcctcttgtccctattatttctctagcagacttggctctttcgttcggaatgttaatgagtctttagttgcgacggatctttgattccagcgaacaaagacgattgtctcaaggccatttcaaatgttgacacgtcggcaacatacaacgacggtagtcaatttagcgaaggcgaatgctacctggtctacgctacaaacggtagtggtgatcaacccgtcagcggacagaagatccatgatgttgctcaggccattgtcgacaattgtgacatgcaacatggaagctttggaaccgaaaactgcaattcgtgccacgtgactgtgaattaccgctcttgagggatggatatgaattgactactttggtgatatgtaacatgctatactgttgatgggaagtggttgggctgaatatgcgaatgaatgatatatcgagaacttgattactttccagactatgattagtagtttctttagagatgttgttctaaaattcatccgaagtttgtagaagtctaagcatttcgcactcccgatttcttcacggctgatggcccccctcgaggctttccacgggtgcttatatcttgaacctctgttggcacaaacaagacctgtatacatggtggaccgcaattcctaccgcaggattcgcctgcgtggagtggagatgaaataagacattcgatcaaaggcaggataacagccacatggtcaagtgctgcggtagcctaggtatctatgataagggcattgatgtatttctggcattctgtcagtattaacgagagcggggggaaacgagacgtgttccgccttcgagaaacatagtaaaaggaatcaagccactctttgggattgattattctcatcgtctgtagagcgtgatctcatcaaatcccatctcaattcgaaggccctggcgttggtctccggtcctctgggctccacgagggtcgggtcgaagaatccggacatccagagtggccccgattcttgtctggcacctaaaatgggttatcgagatgtcggcaaaacaccgaggtcatataagcgaagaagccgaaccccgccccgtatccgagtacagactcactccaatgaagagcattgactggaagagcaatggtgacaatgtgccattttgatggttactttgcagatctacctgatcaagagttggaaaacatggatggagccagtcaaaataagcctgaagtaacgtatcacagatagcaggcgacaaggatacgagggccttttgcttctcaatatttgcttagaatgccccgaggctaaggttatatcaagttcgcgaccaacaaacgtcggcagcttaggggctgccaccccgagtacgtgataaagactgtcaagtcgctaatcttgaagcttagggttacgacgagtgcagacatattgatatataattggcgctcatgggggatatgggcggtttgggtaaacaacatcgcctgctagcaatagagaactcgtatggcctcatttgccaatcagaagcatcaaattatctgtgtgaattattgggctcttataatatttgttgtatataggatcaatctgatagacccagctccgctagaatggcttcattgtgttctccaacccgtggaaccgaacccatctgagcgccatatccacctttttcggtggaattggttgatccaggaggcaaaagagccgggatggctcccatgggagttttaaccctggtccaccgctctcgtgcttgaagctgagcatggtcccaaacatttttcatgtcgttgacactagcattagcgattgacgcttcgtccaaccgagcgattgtttcctctgctgtaaacctcgagaacacgtcgtggataatagatttgagctcatcccgatttcgagttcgttgtgaattgctcgaaaatctaggatcgatggctaaatttggttgtgagaggacgccgttgcagaaactaacccattccctctcattctgaacgcccaacatgaccgactggccatcaccagcttcgaacggcccataagggtagatagccgcatgcgaggcacctgctggcagcggtcctggagcgttgtcgtatgcgtagtacatagggaatcccatccattctaccatactctctagcatggagatgtcaatatggcaaccctggccatctttaccacgttgcagtagcgccgagagaatgttgctgtaggcgtacattcccgcggaaatatcggcgatagagataccaaccttcaccggctcttttccagtgcccgtgacggatagcattccagcctcactctgaataagaaggtcgtaggctttcttgtcacgatatggaccatcttgcccatatcctgatatatcgcacacgatcaaagcagggtatttctcttttaatgcctcgtgagaaagccccagtcgcgcactagcaccgggagccaaattctgaacgagaacgtcagccttttcgaggagcttcatcaggactgcatggtccttggagcatttgaggtccagagccaaactctccttagagcgattggtccatacaaaatgcgacgctaggccattgactcgcgtgtcataatgtcgtgcaaagtctccaacacctggtcgttcaaccttgatgactcgagctccaagatcggcaagttgtcgcgtgcaaaagggcgcagcaatagcttgctcgaggctaaccactgtaactccagcaagaggcagaggcctagagggcgggttggaataatgacgcgatatgagatgtgattttcttgcatgttgaactacaccggacagggcttgtgatcgagaagtaagtgagaagaatgctttcattgtgggctgggtattagagcctgtcgttgcaatgccagctagttgtcttgtgcatttagaagattgatgcgaggtcgaattcccgaatgcataactccgtactccgtactagtcggcgcggagatacctcggtcagattgccgggagtcggctgtcggctatggtcaggtgagctgtgattggatattgttgcgcggcagtatcttagtcatccaccctcacagtcttggaagatttcaaggtcccttgttgtatgttggttgtatcttttaacttgcctatcatattcaaagcccaaaaaatcagcctttaaattaataaataataatctactgcgtactaatgaaatgaataagagaagttagtactccgtacggagtacatggttcgtgaaggcggtggtaggggcggtaaggtagtatccaatgagagagtcatgaaccagtggcctactcgtcgcccgaatgtcgaacacgaactttgaactccaatgttgtacaactctcaaaggaaaatctcccttttttggccaagctccgattctgataaacgccaagcacatcgaaacccacgcgaggcgcccaatgcaccaatgcacacgggaaaatttgtacttcgtacggagtaccctgtcggtgcaagttaagtgccagggactcccctggacaacctcgtattctcgaaatgtgtctccttttcgcctcatacccatacgataaatgtcataacacaccgatcgcgatcagatgagaaccgatggttggtgttccccccagcaaaggctgcctggcatgtctccaacggcgggttaaagtaggaaacccccagtggtaggctattttctttttgcggtaacactctaattcagtgtccggtgtgatgaaacccagccaagatgtcaatcatgcgagagaagagggaacccatgtcctggctacatcaggaaccggaaattctaccgtttctctgcatcaagcagtcatcaccagctctcaagaaccactttcccccgggcacaatattcaacatcaaatatggcgctggtcactgcagaagaagcgcagcaatgggccacgattccccgtgcgtctatggatgaggctctgatggcaggatcggtttcgaaggcgctagaccggcaatacaggaatggcttttgtgatctcgtggatgctatatttccgaacatttattacagctacagcactcacgtggaactaccttgattcgagatcgctcagaacgcccgtggcgcacgaattgcaatggaataggggtttcgcagccttgggagcttgcagctaggcatagtaaacggcgatcaacgaaatattcttgccagtcgagaaatatatggccgtggactgcgctatcttgttcaagccatcaagaatccagctacagttggcacggatgacaccccggctttcttgccaagaccaaagctctagtcgcctcctcccgaactactaatgcggagagagacgattcaatgagtgcaatcaacaacagccgagagattctgggcgatgtgaaaatccaaataatggctggtgtgagggctgatcacgaagggaataagaaaaagtgtgaggctttctttctttaaactgattccgcgttctaccaagaatgcatcggtgggatccactctcgagggtgttcattcgaccattgcacttctccgatagttgtcgcttgtactagtgtccgatcgcagtcgacaaaaaaaaaagtaacaccgtggttaaaactcagtccgtataagaatgagtggaaggtcatcaaaagcgctaccattgcacgcatttcccccgctcggaattatgacaagacacccaagtggcattcaagtggcattccgaggttgaagcgccgcatctagccctttgtgtgattaactcgcaaattttccagtttatcccgaaagatcgacggactgaaagcgaccgcactgtcttgagaaactgggcagttatggggatgcggtcatgtgcgacgatgcatcccaagatcatgacgggaaatgacattatcgcagcccacatgaggggggagggggctgggtcccattgttacgaagcaatctggagagaaggaacttaatgaatgttcgacgttgggaatgctggggatgtttcaaatccggcgatcaccggatcaagagaggttatgacatcgcagtgaagtaataataatgcattacaagccattatcattctattcaattgctccactagatcgaattctattctctgattattatattgattgcgtagcctttttcccagcctcgtttcatacaaattatgtacactctcaatcgcggtcttagcgcaatcgcggtattcagtgtaagctcaaaaaaagcatcgtgataatgtgaccataacgacgagatcgtcctgaaacattctttcctagcactgccccgtagaaccatgtgagatccagattgcacaaagcacaaggtgtcattgattgttcctggaggaagaatgctggggcggttttgtcacattttcgaaaccggcgatcatccccggggaaggtaagttgtcgtacaatggggaatacttgcatatgtactatatcctccatacatgtgattgatgtacagtctgccctcctcagctcatgtctcgctaatgtatgcttgctcgaaaacgcaacacaacacgggtacctggactctttgcgggtacttggggcatctcaagattccagcccccggtgcttgcgtggcccctgcagtgttcatccattcggattggtcacaacgcatgctaagcattctgctggacgccattagaagcttggctagccattgggagtgcttccggtggaccattaacgtcatacgaatctggattgtagcgagtcgcctacaagtgccgatcagaatcggcccaatcatcgtcttaaccaatcctccacaggtgtcgccacagcttgcgtgatctcgatttttgatgtttcgagaagcaatctattcttagtttaccaacgtctgcaaatgacaagagcgaccgagggatatatatatagaggatcaaattcgccgcctagctggttaccgcattgctagacttaccaactaggttcaccatactactttgatatacgttgtggacaaaatcaattctcacaatcaaaattcatctcatacattccctgtcatgccgtcctcattggcttctagcgagcgctctggctcggtcaagtcgcaccacagccccaagacttctcttcagagcaaggccgatcctaacatggccctacatgaatcagaacctagtgtgtattcccgccaaaatagttcatcttactataggacacccactgacaggaagtagccgccgtgaacctccaacctggatctcgggatacattctcgctccgaagcatccagcataaggaccgggaaggaaagctcatcagtaagtcaccgagtacaattatgttcgattagaactgcattctaacctggtgatagccgatcccgatctctccaacccaacacgcagccgactcgagcgcccgctcgacacaattcgatcgtttgatgcagccatcgatgcacatcgcaaacagcaacgaatataaaggagggatcaggaccaagtaattacaccaggacgaaacgaaggaacgcttcttaatgccaatctcaattcgaacacgaggtgtcgatgtataattaatgtgtataatggagtcacatggagatatcgaaattcgagttaactattctttcatctgtagcggggtgtggaaaatgagcggaaatgtagtctctggccatttattgcgacatgtaaattctggttttaaaaccacaaacccatgaagaccgcccagaaacatctatgacaattgccggtgtaggccttttagtccactaggattatttacaatttccaaagcatgattactactgaggggaatttacaaaatatatattggagggagtgagatccccacaaaatcaacagtcatgtatgttgtataagattctccacacatgcccattcgcaaagggtattgtgcaactctcgaccggagtttgccgttgtgaacttatatagaacgaagtcggtcggctattggaagctggcatacattgcaagcatggccgaaggagcgtagaatcggagaaaagccgacttgatctacatgtcgatcttttctagactacgttggcccgaagtatacagcaattcctaaagatccccatcgtggattgtaactaggttattcttaacttgctatttcccacatgagccctcataaccctgaatctctgcgacagtctaattacgcatatgaaagggaagaatgacatgcataaatacttgtgcatagatgaatcggccatatagagaaatcatctccgaggtgattcaagatcttggacagttttctttggccaataatattattatttcctagggccaagcaattctgtagacagactatagcttcaatctacctagcgccgaattaaattagatcttttgaggatagaaaaaaggagaaagccacccaatgtcggcgctataccaagaagccccaccacgcaccgcgtcagctgaattttttttaccttttttttcatttcaactagtgagggaataactgttaatttaagattacttttgatggctgcctatttcaatggggaaatgcatacgtggtagtgtctttgtttgcagatcgacaaagaactgccaaagccaagtccagttaagtacgtggagcctatccatctctctattattattcgttcggactacatgaaccgattcgctctcgagccctaataatgttctttttgagagactatctccgggaaaactgccatggcgccagtggcctaaacctattgaacgatggcttcaaagcacttgaccatattgggcatgttagcttggctatacgcgtccttttcgtggttttagagagagcaaatagaattggactatctgacactattaatcttactattaatggatttgaagccatggattccccccgtctttgaccttgctctcccatttcaccagtcattattcactcgtttgattccttgattccttgattccttaattctctctctatctttttcaatccaattattccaactacatacattcgctataaacttttgcggcatcagctccgcaagaccattcatcaccatgaaattctccttggtggcactggcaaccctggctggggttgctgttgctgatttggatcccatcatcatcaaggtactgtctttatacatgttacatgtattcaaaccgtggtgtactaaaactgtcaatagggctccaagttcttctattctagcaatgacactcagttgtaagtccgaatgtatcgatgtatctcaaattcggtgactgacaagaacagctttatgcgtggagtcgcctatcaacgtaggtcgtttatgcagtcacctcaacatcccgactaacctgtttgcagaggaaagcacgagtagcagcggctacactgaccctctagccgatgccaccgcgtgtgcgcgtgatgttcccatcatggctgaactccgcaccaatgttatccgtacctatgccatcaacgcctctgctgaccactcggcatgtatgaaactcttgtccgaggctggtatttacgtgatctccgatctgtcagaccccgatctatcgatcgatcgaaacgatccttcgtggacaaccaatctctttgcccgatacactagtgttgttgatgaactggcccagtacaacaacactattggtttctttgctggaaatgaggtttccaacaccattgctacttccgacgccagcgcttttgtcaaggctgctgttcgtgacaccaagaagtatatcaaggagaagggctaccgatctatgggtgttggatatgctaccgccgatgtgtccgacatccgtgcggacatggccgactatttcgactgtggagatgccgaagatagcattgacttctggggatacaacatctactcgtggtgcggtaattcgacctacgcgaaatctaaataccaggctcgtaccgaagagttcgccaactactccgtccctgtcttcttcgccgagtacggttgcaacgaggtcacgccccgcgagttcaccgaggtgaaggccctctatggcgataccatggcggaggtctggtctggtggtattgtgtacatgtacttccaggaggctaacaactacggtaaggaaatgattcctttcccacatatatgttcgggtaactgatcagacttttaggtctggtctctgtcgtcgatagcaccagtgtcaagaccatgtccgacttcaaatactattccagtcagatcgccaacgccaaccccactggtgtcaacaaggcctcctacactcccaccaacaccgccctgcaaagctgccctaccgtcggagccagttgggacgccaaatcctcccctctgccccctgccgccgattcccagctgtgcgagtgcatgtacgatgcctccgcgtgcgttgtcgccggatccctcgcctcgacgaagtacgccaacctcttcagcactgtctgcggctacaccgactgcagcggattgacagccaatgctaccaccggcgagtacggtgcttatagcatgtgttcaaccaagcagcagcttgcctttgccttgaacaagtactatgttgagcaagaccgtgctgcggatgcttgcagcttctccgggtctgcaaccgtcaaggcctctaccaaggccactggcacttgctctacacagataaaagaggctggaaccgctggaaccggaactgttactaccgaaaacactgcaaccgccgactccagctctgcttcctcgacagcctcgtcgtccacgtctagcagcggcgccatcagggtgcaccacagctcatcctttggctctttccaggtggctgcttacattgccactgcactcctggcgggtgttggaatgatcgctctgtaattcagtagatcttgatttttgtattttcttcgcatttggaccgtgtgtctgttatttcttttcgttccgacatctctgatcatgaagctcaaagcaattcatgttcgagctagcgagaagatagcattacttgcaccttttcctgattgattatcattgctcgagaaagaaattgataaccatcctattgaagcgtgcaaatcgttaagatagaatctgatttgtataccatttgttagccatgtctttttagcaatttcggttttagttctagtcttacaagcctcggtctcctgtctttctcgcattcttttcttctaaatcaccaatattttgtgtggccattcattgacgggtcgtcttactagtgcgtacccccgaccttcatttgatgttgtacatcgtgttttgagcccaggatgcagaagcatatcacccaagctctttgatgtcaccaacgtaaaattatcattaccttctcccagtctccccatccaaatgcaacataccgatatgctcactgtttattcttctcggaattaatttatattttgtctgaagtcaccccgggttcgaggctgcttcaaatagagattatttatatcatttgctgaagtatttatttatatcctcgaaaagagtcacccctggattcttgccatgtcatatactgctgaactcggatggaattcaatggcacctcatcctcagacccatcgtcggcatgggacacctccagctgtgttctggttttattacgcggctcattcgccggtcgtagggcagagttatccaactcataacctttagattggtcgagatctgtagttcgtgatctagtcccagaccggctggagaacttggatgaaaatatcatgaacagtgggcgcagggtcggcatgcaagcggagataatacccgttgaggattcaacgacacaccaggtgcaggatcttccaagtgtccaggcaatgtccgtcgggtcgaatccaaaaatggtagcgaagcgataggcactagtgaagacaacgctaagggagagcagcccggttagtctatcgtcacaaagtagtaatatgtaggaaatggatatacggacaaactacccaagagaaatattccaatcacggacagtcgatgcgtgaggcttgcgtgcagtccccacaccaccttgaccggtagagacagaatgagaatgtcggtgagaatgttgggtactgcgttcccgatgaacatgcctttaaggttgatacatttaccaggaatgcgcgtgtcccaggctcgcgggatcggattgcattggaagacgctcacgaggataatagcgacaagccaggagagtgtcatcccacccaataccaaggaggcgatgcggatttccctcgtggggaagatgcgacagtacatgaggaggatagaaattttggtggttgctaccgttgtgacgtacatgatctcaaatatcagtagaagctacttggatgttagcggaggtatcaactgtatcctctgtaatttgaatcggacctttgcaatcattataatgtttgctaacggcaagacctgagaatgtaaacccatgccataattagttactatcaacaattagcatgagaatcaacaacctttaggggaaatgtgtcgtacaagatagcatcaatccaacgagtgctaacaaaggaaagagagcgagcgcgataaaaaagtcgtccaggcctggctttagtgatttcttccaccgtgcgagaaaccgtaaaatcacaaacaagacgcccaggacagtcatcgtgatcgtcccggcccgataggacccttggtagctatcctgggcattgtatgcagccatcgtgttgggacgttcgaaacaggccaagatcaaggtgcggcaatgcttactttaaagagaattgattcctctcatgcagcccccgaagcggcaaaagagacttgtcagagatgatccacttcaagtgtcaggattcatggttatccactattgagcgacaaacggtatgcctaatgtgtgcacgattaatattgcgaggatcaatccgtattttaatactctctgtgttgcaactagtaagaggactgcggaatactacggaatgccaccgcaacaaaattcgatgtgctttggtgcgtaacattttgagacgaggggatcatgttattcctccagtcgtatgattttcattatttccttcgtataggtttaaggttcagtcggccctgactagatacagggtttagtacattaggctttgggtctgctggtacttgttatcatatgtaacacttggacaccagttcctttcgactttgcgctgttgctgaataaaatacaagttgataggagagaatactgttttacaatgttgtacggagtagcacaggaaaagatatccgctgggaactccgggtattctgcatatccctgatgatctgcatgtcaatatcccacagcaaatcagaagcacgagaacaacgaacagaaaagggtatgctccgtaaataagaacaatggcaggaacaacggccttgttcgatcctgcgaatgtccgcctagcccgttgtggatcgaggcctctgccaagattggaaattccggcgaccacgtggatactggttcgaagaccccaatcggggccctttggtgcaatatccgaccggtctaacggttttgctagtgacgccgggaacctataacaaggtgaatctcagtcgggctccatcgttggcccaagcagtcggaatacttcaaggaaattgattataacaatagatccaaagagccaatcgttccacgtaccgaagaattgtgggcccggtataacctgcccagttcagtataaggagagggtgatcctttcgccggggtttgctgattccccagaccctggttgggcgtagatgtacggagtgttttcccaccccaattacacgatggccatgtttgagaacccgttttcgtcttcgcactaggcgcatgacaggccgctgacacagtcgacgtccttctagatctaaacgcacaagcgcggacttatttcggcccgtctgtgggcgcatcacaattaacgtctctcaaagaaatggtagaagctggctgctagattttggtggtaaacgactcctgtggcgaaatcgtcggcgccggggttgttgggggcctgggtacacgcagcggtgcaaagccggtcttcccggcgtaatcatggctgcatttgtgacgtcccaggggaaaacggtaaaggacatgctgggcggaagcctcctttcctggatggtcatccaggcgcagggggaggggtgtacacagcatcgcccttgctgccgttgtagtgcgtgctgccatggaggttgagtagtcgtaggaatcatcactaatttgtaaaaatacttgtcagtcaaatgcagacaccagacggggtaaccactaaatagagatatgaggtatcacttactggtgggagtaatggtaatagttgaagttcaatcccgcggagccgtatgctctgagtgtcagtgagagtcgatttggagtgttttcggttcttgaagatcaaatgttgtgaatctttaatttattacccgctttgctctatagatatatatatgcctctactcatctggtaaaagggttcacctctaacttgcaagcacacgacttgatatatataacttccctgctgcttttgtagtccgtcaacctatcatgattaggtcaagtcgcatctctcgtttttatatttctacttcatacaagaaatggcactgccaatttaaatccccgtgcatcctcgcctacagaaaaagacttcatttgatttttccaatgatgaatatgcaagctcgctctaaaaacgcaatgtccggaatttattgagtttccatagcccatacttcgcgatagtgaccgttccaattatacacgttccgacaagaattgcaaatgccgaaggactgtcttcaaagaagtttgtcacgttcattccaaacaggcccgccacaaaagttgacacggcaaatcccaacatgcagatctccagttgagcctcgaaaactaggatctgatttcgtcgtacatccaagattgattgaatggtctccgttgtgcgctccaaatcgcctagtaaagcactggcagactccgcaatagcgtccgtgctcttgtaatatgcctcgaggaggtattccacttcttggtgatcatctacctcatgcggttgacctgcctcccgatccgttaagaacatggtcgccatgtcttcatcattttcaagaatttcccgtagcgcggagcggaactggcgggcgcgctgctgaattgccacgagccttttcttatgattctgcaacccgcgcagaacagagtaaacaacatcttctcttgttgaatcctgcaagctctcttcagcttctcgacggataagaatatgctcggcttcaagagtcgcaatcacagaggcaagcgccgcatccactactcgtagctcaaatgggagtttggataaaagaccagagccaggacagggttggagcctgccctgaaggtctgtcataaagacatcctgcaccttcacgtgggagttttcaattgggagaagaaatagaagcactccatttgtgcggaccaggagccgtaaagtaaacatgctgatgaagataacagacggacggaccaacaaatgcgggattccttccgagacaagatccacgttgcgtagatcgcgaccatctaatccccaccgtttagcaatctcatctctagttcctcgaatttcagattgtttgacggagccatcgacatccaagaccatgccgcgtaactccgtcgcatcatttatgcggctttgcgacagagcaagagacaagttgaacacatcctgattgaaggagacttcttttttcatgtcaggctcccggatgacatgatgcgatttattggggagcgtgatgattccccgtttgcggtagccggccatgttctggatcttatgttgtttcatgcggagattgccggaaagatgatggaattggcgtggtgtatttgtacattttgacaatctttctcttggaacaaaggataaaaaagtccttggagcacatcgatgcatgatatatataccgtctttgccggttgccagtgtgaacggaattgtgtccttgggcaattgtcgatgcactaatcgggttatgtgacttggcgactcgcgtggcttatcatgaggttacgtagttacgtagtaggtcatgggcgaaatggatatatggcgagggcaagtatcattgattatcattgatagtgtgatctaagagagcgaatgctatgacctgaggttcccccctagtggaagaacgttcatccggcaattcggatgatctgcctcatggctatgcttgtagctgactacgctggtctttgtactagagaagccactaaaccaaagccgtgattgaagaacgaatacgaagaaatacgccacattttaagctggtggaatgataggggaaaccttccaaaaataggagatatttttggaaaccaaaatacctttcacaactcatgcacgattctgcagcttctgcagcttctgcagcttctgcgtgattctcttggggtcaatacttcttcacaattgtgtcgatatagttgatattcttgtctccaaatgactgcggcggcttctagttgggacacgagtcgttgacaaagccgctgtatgaaacgccctcggatatagtccggcggagccaattgtgaggaggagcgagccatccgtcggtggataaaatgcggaggcatgagaattttaaagaatggatcaaaagatgtaggtacacgaccgagatactgtacggattagctgggactgatctggaatctcggcattggtattgatgtcggcatccaaaagataggttgcgaaggccgtaagcacagcgggtgtattggccacggtatagttgcttatcttgtagtatatatcgatgccagtgttagtgctgaggtcacatttacgattcctgggtggttgaacgatgatctggcgtcctcgggtccacggtcggccaaatgctgagtcacccaccaattcaaccgtccgctaaacacgctgacgatagcagggtagcttgttacaggcaagggaaacttcagtatgactacgtcaatgcttcccttctatcatccattgtgctcttcaagttggcgacaccaatccactctgacacccatcatgggcaatatcatctagccgaaagtcgatcccctccctgtctacggacatgacctgacgggtaagctcatcgtcattaccggtgccagcgctggaatggatctcgaaacgaccaaatagctgctgcgactgtgcgcctcgattatgattctcgccgtccgcaatgttgccaggggtgaggcctacgcaacttttctccgccaggaccgccgcattcaaacataacccgggggcgatcatgaaggtcatagttcttgatatcgatgattttgacagcgaataacggctcacgaagtagctccgcgagaggtttcggtagtctatatcctcgttcttaatgcggctatcggtctacccaagctggaacgcagcgcgagcgaccataaccgaaccactcaagtcaattactacgccaaagtttgtttactgccgggctaatgccgaatctagaggggagtgcagagaagacaggctcttctgtgcgtattgcctgggtcggcaatcgcgcgcacgaggccataagcctggataagaaacctcctaccaagcccgatgaaggtctacttgcgcatatggacagcgaagatgcctgcatcccgttccagcgctatggggacttgaagcaaccttgcgcgacattcatatacagtttagcgccgcggctggaccccaaggaagtcattatcaacatgacgtgcccgggaatggtgaataccaacatgcgcgacgttctccccctacatatgcgcttgattgtgaatcttgtcatgtccttccgcgccaagcctatcctgcatagtgcatcctgcatagtgcactggtggcgggccccaagtcacatggcaagttcttgaacgacaagaccatatctgagttggtaataggctttgtcgttccatgtcaatctcgttttaatgaaagctatcatctgattggaatgttgcagggtgaggaaattgcgttattgatatgctcgtatgcgtgcttatccacgtgagctctcgctcaatggccgtgcctcgtggtgcagcagcacagtctctaaataggagaatgccaattcctactctgtaagctcgcgagagatctggatagctggtggcatcatactttggagttagggatgaagcaggcctatcggagttgctcgtagaactgacatatatttaatggcgaggatcacgcatcgagatcagaaattatggcatgggaagtccatatctaagccgagtcagttcccttcatcattgtactcggtgaagtcgctgtccgggctgcgccgtcaatattaattatgtaatcatgtagatgtccgatgtacaaggcacaaacggtagaccacgtgactagacgtgagtctcgaatctacgttgtgatgtcattttgcctttacccgtactccgtacggagtacagagacggcgattatgctttgattgggtcaattaatatctgaagatctcaagcagaacaagcaatgaatcacattgggcaaagcttggcttggtttatcgatcagcatctctcggacataatccctcaattaccggaaagagtatctccgagacccggatattctgtatcgagtaagcagctcaagacttacatttacgtcaaataagccttcgtgtcaccgtttcaaaggccgtctgtcgattgacaactgttacagagacgcataacacatacgttcggagacattgtggtatacccagataatctggaaaggcacatctccgacaaggcagcaacgtctcacccatgtctagcgccgtcgcaaggacttcctgcgacgaacaaaggaaaatcaatccgaaatcacagtcccttggcaaccctgaaaatggaaaatcatcaagacaacctctctccagatcatgacgaggttgaaaattctcgcgctccacagcgccgccgccgaccgcccctgtcttgcacggtctgccgcaagcgcaaattaaaatgtgaccgctctctgccctgcgggcaatgcgtgcgctcgaagacaacagcccaatgcgtctttatcggagctcagccagatccgacatctgatcagcgacgcatgtcgcccccgcaattaccacacggtggcgtagaagaccaggccggccggaaaagcggaatgttcgtctttgactcgaagttggggccgaattcgacttcaaatcgcgtttcaaagcgtgctcgttccgatgagctacatgagctccggagtcgtctgcgtgttttagaaaattcgctcggcaagtcgtctcatcttcagacgcctgagacctcggtttgtgatatattttctgaagtagatacggccaatagttctgagaatgttggtgttgatgaccgcgtacgattcttgccagattcaagtttccgcgggaagaagaccaagactcggtatttcggtcgcagtcattataccaccactgtttcctttgtgagtatcctttattgcgttgtttggttgatttgctaattagatgtagttcaaagatattggtacctttatgcgccgtggtcgttgccgcggaggagcaaaggataaagagtacactgatatgaaacagttcaagaccgagctttggtcgcgtgagatacaagaacatcagcgcgactttcgcgagcagcctttcatgcttaatgaactggttccccggcgaaacgttgcagaccgtctgcttcagctttatctcgacacttttgagaccacgtatcgaatcttgcacataccaaccttcttgagacagtacgctgattactgggccaacacccagccaaccgacatggccttcgtcgctcaattactcgctgtgatggctgcaggcagttgcttctatgtcccatctccaggtcaagaggaccgagacatattccaaaaaccggccatgaagtggatcatggctgttcagtcatatatctcgtgcacatttctgagcccagaaatcgacttccgaatgctccagacacagactcttcttttagtagctcgcctgggagtcgccagtgatgcggatgtagcctgggcctcagccgggtcgttgattcggtctgcgacgataatgggtctgcatcgcgatccggctcgtttccacaaggccaggccattctactctgaactgcgccgtcgtctttggacaactatcgtcgagctggatctcaagttctccctcgaccgcggggctccaccctcggttgatctagacgaatgcgactgcgatccaccgtccaattgggacgatgcggacttgataccagacatggaggataatccagctccgctcagtactgccctttatacccaaagcttctaccaaaccctcctcgctaagaccctcccactacgataccgaatcgcgaagaaaattaatagcctccgatttaatctatcatacgacgatgccctgcgaatgggtgatgaactctcccgctccatgcaacatgcatcctcccttttcgaagataattccccgagtattgctctgggagaatcaggacgtcaccgattcgcccaatccctacatctcttcatcgtgcgcaaattccttctcgccctccatcgccccttctcgcttagtgtcgtacgcctacccaaatgctcctattcccgcaaaatctgcctcgaagaatccctcggcattctctctcagatggaactcccccttgcgacagagaacatcatttacccgaacattactcaactgggaagcggtatgttccgtgatgaaaccttccacgccgcaatcaccgcctgtgtggagctgtcccttcaagccaatgaaatgagtatgtctactacatccgggatggatggtgtcaactccagcgtgctcatgagcatgatccagtcccaacagggcgtgatgctccaggctgtcgagcgcaccgctgataatttcgggagacgcattggccccggtgggacggggtgcaagcctttcttctttttgaatatcatccttgcttcggtcaaatcgcgcgtcaagggggaggatcctttgtgtaatgttgatacggcctcgaagaggtccgttcgcatctgcagggcgatcttgaatggtcttacctacgaggaagccaagattagtgttgataattgccccgctcaggttggtatctccacttatagctgtctgtctgccacacctaaccttcctgttcagacttctattccttcggggacgaatcctgccccagctacaccacgtgatattgaccctacgtcgcttctatcgaacgactttggtgacttcacggtaagttggcgctccttggatgctgtttggggctctgctgacctttttcagccaacggatctaggaggctggtttgatggattagattacactggcccagagttgtgggattgggatgccgacttgtctggaaaccttccaacattctcatgacttatggagctactccctaatattaatgactgatgcccggtgatattgcttctgttcaatgtcattctcaaactctactctcatctagtcaaagaatgactttcgtcacagtaaattgttagaataataaatatgcatatccttttggcttccaggaaagagataaaaattgcaggaagaagattaacaatcccacttcctcaagacaccacaccccggaagatatagagaagtatcaacagaaatgagatgctcaatattctcttaagtgaactctgtccgatataacaaaggtgaagataacattagtaaaaggaatggaagccttttcctcaaatacaaatctcattctgacgagctctcttaaaagacttaattagaaatacaagaaaacatctaaacatctaactaaaacatctaaaacatctagaacctaactctatagaacgacaagccaatcaaaccctcaaagcctcacaacttctctatctctttccccatttcttgaccgcgaacaagcccgatcaacacaattcttcttcgaaatcgcaacataactctgaaccaatctatccaataacaaagattagcagaaatcccagatcaagtccagaagaagaaaactcacgcctgataccgctgaatgttctggatctccaaacccgctagagcccccaatgaatcctgcacatcctgcaccaaactcacacaccgtcccatactgaaatccgtcctgacaacaaccctcatcatccccattgtctcgcaatccgcagccatggtataagcaggcacaatccaccccttctcgcgcagtttacgcgcaagcgcccattcatccaagaagacgttttgcgccgaactcaacctgaacgccacgaccggtaggccatggccaccaccttcactcatgattatgaaccccatttcttgcagctggctggtgaggtagtcggctgttgccgtgagatttctcatgatgcttgtgtacccacttcggcccagtcggatgagttggtagtactgtgcgatgatatgggatgctggtttggagaagttcattgtgaagttcacttgctcggcacctaggtagtcgatgttgaaaactagctccgcgggaaggtactctggtgatcgccagagggcccagccgataccggggtagacctgtggaaattagcatattgagtttattagagttggacgatcaagggatacttaccagtccgtacttatgcccagagacattgatcgagacgacgttgggtaatttgaaatcccatactagatccgggttcacaaacggggccacgaatccaccgctggcggcatccacgtggatgggtgtgtccagtcctctctcaaggagaagttcactgatagctcgtacatcttcgtactgccccgtgtatgtcgtgccgagaatcgcgcagatcccaatggtgttctcatcgaccatgtcgacggcttgaactgggtcaatcacgtatctcgtctcagtacatgggactagcttctcggtgatatcgaagtatctggttgccttttcccagcatacttgtacgccgctactcatgatgatgtttgggttggaggcatctttcccctgggtttggcggttgatttgccagcgcttcttcatcgctagaattgcaagcatgatggcttcggaagatccaatacatgatgtgccaaaggcggttggagttccgtcagaaaccggggaatggaataggtcggcgaggatgttcagacagcggtgttcgatatcgacagatttggggtattcttcgtgatcgatgatattcttgttcgaggattcggcgagtagtttgagagcttcgtcttcctgttacagtgttagtatgcgtcaaaaatatgacgagaagctgaaataccatgtatgtggtcacaaaactggcgaggctatattgagcaataacgttagttgagttttcaaaattttgacaaatagactcacttcaagattggctgaccatccagggccaagtcatctttgatcagctggtaggccacatctttcggcatcccttcatctggaagccgatgcgatggcataggtttggcaacgaaccgggagccatagacgtaagagcagtcgctcgtctggtcagaaagctgcttggataattcctcgatagaacccattatgtaatgaaaaatgtagattcaaattggaatactgataaactagcaagacgttcttgactttatattatttctcgcaagtcaattgttgcgtactggaaaaatatctcatagcgaaatcgtgtgatagggttatgaggcatttacacgagatatcatgatcaaagctatagtcaaaaggaggtttgagcgccgtttcaagttgggttttgcgttcgtgtctgtagtttgaggtatatatacatgacaacgtgatgatcgaagcttatctatatctgagtattccatgtaagacaagccaagaccttctagaaaacatcagaatagactattaatacaacagtttaactaactccttgttacaaagtagaattgggagtgatccctgccatcccttgttctaaaattggaaacattctaaccctacggagtagattacggacagagctaatactggacaatgcaaataccaaacatgcgatttactccctttgccacatttataaatgaggcttagaagcatctttggcttcatggttaattagcccctgactcgcaagggaacgttcaaccttcccacctccgcgggtgcggcgggccgaaaataggggtggcgcagccacaatatgtagtgtttctcacatgcattatctcgtattattattacaggcagcaggatattgatttgtggagatgagacgataaggtcgtcaagctgatagtcctggagtggtatagttattctactgttttgactttacattcatatctattgtaggagtcgcgagcatatatcgtgttatccctatttgtcctaacattttgaaagtggaacttccaatatttattcgacgcagtttgacatgctaagcaattgctccctatatgtacggagtatatgacacgtaaacagagcacccccttgctccggggttcatgcaagtcgtggatgaggtcaacaagattaggctcagacacgaagaagggagcattcttcaataatggaatcgtcgtgtcggcattcgtgtgatttacaaaagcccgtatcgccattctgtatcctgttcataacatcagtttttcgcttgcgggaacaggatgctgcatccaattctggatgttagtagtgttaatgttatcctctcattatcgggtaagacttgaactggcatgtctaggatgttctctaattgatagttttaggaatatacgtcttggtcttcgggtttatcgctgtgaaaatcaagcaaagatggtatctcggtgaagcttgtatggtgtccctcaatctcactagatatcggtcgctgatattattcagtaccctctttcataatcggagctgtcctaggaccattcggtgcgaagttggtcaatgtcggccagtggggaggatacactgacagcggtagtggtgatattgcctatgtaggtcctctcgccacgaaagaaaacactaagctaattatactagggattgacccgagtcgtgattggcatcgctatggtcaaagtcggctatgagctaccaaaacgatacattcggcttcatctggtcgaactaaccatttgcctattgccattgatgacgatccagtggctgatgacgtcggcatgtatcaaattaatgatccctaatctatcgtttgtgtgttcatcttatcatatttgacatgagaacacactcccactaaccttgatgcagttgacttccctcatcatcggatcatgtgtcatatgtatcgaccccgttctctcacaggctatcgccaagggtcctttcgcagatcaatatgtccgacgacatcttcgtgaatttatttcagccgaggcaggtggaaatgatggactcggtttcccatttttgcttctctcaattgcccttcttcgttatgctgatgctccgggtatggagacagtaaaagttggtcctaggaaacagagtcgagattggattagtgagccgagtacgggtcggtttggtggagatgtcggccgagctttggcccattgggctgttgagggagtgctatatatgcttgtcatgggcgctgggtatggtgtgctggtcgggttcctgagccggaaagccttgaacttggcctcgaaaaggtatgcacatatatactatcagtttaacaaactagctattgacatgagcaggcgttggattgacaaggagagcttcttctcatatcctgttgcgatgggtgtaagttattcttgagaaagatttggagtttatgctaagaaggcttgcagttgtttatcgtcggtacctgcggctgctttggctccgacgaaactcttgcctgctttgttgccggctgtgcattgaactgggatgggtcttaccacttcgaagtcgaagagagacatgactctttcaactcaacaatcgaaaacattttgaacgttgggaccttcatcttcctcggcgctatcatgccatgggatcaacttcacatgtccagtcagaatggaatcactatcgctcgactattcgggctcggatttttgattctgttattccgtcggatcccagcgatcatgatgggatatcgattcatgcccaaagtctgcgataattggaaagaggccctgttcatggggtattttggcccaattggtatgctatccaaccaagatgttgagtttttatgttgaagtgcagtgcttaccggttttaggagttggcgctatctcctatgtcgagtatgcgcgacgattgttaccggaccctggagagagtgatacagagatcaacaacttgactgcagccatgataccgggtatgatatacttctacttcaagataatgtaaactgacctttgatttagtggtatattggcttgttttcttctctatcgtcattcacgggctctctatccccatcctgagctgcctttataagtggttcaaaatccctactatccgagactacccggtagaaatcattcttctgtccgaaaatgagcctgttcctaacaatagcgtggtgaatcgccgtaaccactctgttatattaaacaaccggttttcatgtaactcaaaccagcacccctattctgatcatggtgaggatcatggcgagggaacagacacgatggtattgcgtcgtcgcagtggggaagctagctacaggggctcgctagaaaggacattgacgaaaggttcgtcgagcgaactggagcagactgtatctgctagaaatgtagtctgagtggccgagaccggggattgtatattaagtgaatatcctttgacatccttatttggattttagcatgagatagacgcatttcctaccttgaaatgattgaatgatattgtcagcaggaactaattccaaggttaatcgaattgcattaactagattatctatttctcgctgggatgaatatgtcatggtattttaccctactccgtatatatatcccaacctaataaaaatgccaacgaacatgggacaaggccatgtgtgccatatttatgcgcctcttttataataaattgcctcctccatccctccttcccttccacatcaataatattgcctctttcacagcgaccgcaatcatcatctacatgttcctatcttcttacagcgggtcagggaagagtttctcatcacctaaactttaatttcgattcgaaactccgcagactttgaagaaaacaggtccttgtccgattcattacgaattgaacttaaggggtcgcttgatttccagggtggaccccttacaagcctgtaagaagatcgggaggcgatgatttcatgcctcggcccctcgaaactgacacggacataaaaaaggtcgaagggcaatagctcaaggatttcgattctacaaatctctgataatcaaaaatgtcgtgagtgcccatatacttccatgagggggaaacactccccagactaaccctcatagtgcctttgtaacaactctcgggctccgcgccgcccctggccaggcacctgcgaaccacgcatcagccttgctaatggcgaactggtttttcgcgtatattctgacgagcccccgcggcgcaaagatacgcctgggtcttgatcacaatgtcagcccgcgtgaggacttgactacgtacggtgaggcggccgtgcagtcgggaaagattacccgtcgcgcccttgacaagctcaagcgacagacgtcggcgcatgccaatgtgcaggagggatacactttgttcgttgcggcgagtatgtggaactcctttggcctttcctttttcgcacgatgaacttgcatcttgtaaaattgctgcactgtactgaccttgccctctagtgctcgtctccttatacgccggtctccccaatgaaactatcaataccgtcggtgcttggtattcggtttcccgggtcgcgtaccacctattctactgcaacattgaatcttactctttgagctttctgcgatcggcggcttggtggtccgggaacatcagctgtctttatgcgctggtgcaggccagcaagaagttgtagaatagacggaggcgctctttgatttctctgtaatccgataatacataagaacaatacaatgcaagtacatctattatccgagtacgaattgtcaaaacggacaacttactccacctaagactgggtgttgaggtcttggaagtcctccatgcctcgaaaaaccacaacacgattctcatgagaaccttgcatgacaaaaggttccgctgattggtggaagaacccaaccctccagtctccatccccagacgggggaatgaatcccggccacaacgatgaattgcacagtttcgaacaacaatgtccaagttcgcgtagtctcgtccgacactctctccgcatccccgcttgtgaatatccttggcgacccgaggagaaatgactccatttactattagcgacacccgcggacttgttctattgccgcattccataggccctgccgatccagcacgcggtggaattgttttgacaggcggagaaatctctttcctctgcccgtgccattctccggatattgctaatctggggaaaggcacaagctccattttgctatggccaatactccggggtattcttataaattagcaggacttccagcatgactctcctaccccggatcaaccgacagcagtatcaattgatttcattgaccttgtgataatgaagttcatcgctattggtgcggtcctgttcagcgcagttggtgcttttgcgacagaacgtattattaaaggcgcccagatcatcccggccaacgacaaattggggctgaagaagatcggtgcttacggacatcacaagcacgacgaccgtcggacagtgacaattcgatcatcgaagagtgacaccgacgacatttcatatgatttcctttggggtatcaaggctgccaatcatggcggtagacttctcttgcaaaaggggaagacgtatgtcattggcaaaaagcttgacctcagcttcttgaataatatcgaggtgcagctagagggcgaagtgaaggtacataaccctagtactgtgattgattgagccgctctgacatgaatagttcaccgatgatatcgactattggcaggcaaaccatttctactactcctttcaaaagtctatcactttctgggtctggggtggtcaggatatcaagatcttcggaaagggtattctcaatggcaatggtcaggagtggtacaatgccttttctggcctagaagttttggtgagcatgaaaagagtcgggaatgacttgtgctaatagataattcaggacccggacaataccttttaccgtcccattctctttgtgactgacaacgctacccgcgtgtccgttgagggtatcacccaactcaactctccctgttggaccaacttcttcgtccgcaccaaggacgtctctttcgacgatgtctttataaacgcgttttccactaacgcatctgtgggttgtgaatctggttatattatcaatcaattctaatccttccgcaggctttgcccaagaataccgacgggtttgactccttcaacgtggatggtctcagtgtgaccaacacccgcgtcgatatcggcgatgactgcttctcccctaagcctaacacaaccaacattttcgtgcagaacctgtggtgcaacaatacccacggcgttagcatgggaagtattggacagtactcgggagtcgaggacatcatcgagaatgcctgggttgagaatgttactctgttgaacggccaggtaagacctccgtatatcgattttatcggcgagcctaataggaatttaagaacggcgtccgtctcaaggcttgggctggaccggacatcggctttggtcgcattaacaacatcacgtacaaggacattcacatcgaaaacaccgacgcccctattgtgttggatcagtgctacttcgacgtcaacgccaccacgtgtgccgagtacccatcatcagtcaatttcaccaacattaccttcgagaatatctatggcacttcgtcgggcaagaatggcaaggttatcggtgacttgacttgttcgcctaatgctgtgtgctcggggattcatctctctgatatcgatatcgtcagcccggctgggggtcccccggtcgtgacctgcgatggaattgatggagatattggcgtggaatgccagtcgagctcggcttagattgtgagtatgataatagtttgagagaagaatgatttgaaaatagtcaccaattgaaagttccgactggcacaaaattgaatagcagtctgtggtggcggggatgttgaatattgcttaacttgctcggaagagtagtccgaggagccgtagaggtgtatgtccgagaagagtagtcatctccgagataacatccatccaataacactcccacatcattaccagcaagttttctacggcagattgctcgtaactagtcgcttattctacactcgttctacatctattctgcacatagccacacgaagctttgaccactttttcgtctcaacatgaacggtcaaacagataggcagcaaatttggagagttgagactcctcgtgatctttcttccccagagaaaatagaggttgatatccgggcccgacatttctcaaaagccaaagcagaagagactcaaaaccaagccgtcaccctcaatgacaactcgtcatgatgagtaggaccgccctcatactgggctattctctctccacaccccacaccatcccacaatccgagtggtacaccggctgagactatatccaccccctgtctttagccaggatgtatcgtgccttgttgggaatggcctatgattcggtattctaggctcctacatgcaaacgcgtacagtacttgcaaatcactccaatccggggagatgcatccacactatcctcctttgccccacccccagattcccataaaggtggagtatggggaaaggatgggatacatagcagatgttacggggtatctgctataagaacgtgggcgtatagatactctgcttttttcccccttctcttcgtccgtgctattatattcccacagaccctggccttcatattcaacggagaaaatggataggaggcatcattatattaagggtgcaaatacccgtgaaggagatgagtctggaaagccatgtgcattctacgtcgaagacccagtcgctcatctatccgaggaacatcgccaatatcttctttcgaagcatggaacactcgatttggaacctatccctgacatgaccgataccgatccatacaattggccgcgatggagggtgagaggccataactcctgccatccattcacattttgaccatgtttctaacatttttccttgatagaaaaatttcaacttgaccctagtcgccttccacgctatgatggccacattcactgcctcgtcgatccaatctgcattcgaaaatatctccgaggacctcgacgtcagtatgcagcgaaccagctatcttgtctctctcttcatcgccgtgctaggcggcgcgcctctcttctggcgcccgctgtgtaatcgatatggtcgtcgccccatatttctgatttctttgatctgcagcttgattgggaatattggctgtgcgaagagtacttcctatgcaaccatgggtctctcccgtgctattactgccttcttcatcagccctgcagctgctatcggtagcgcagttgtcgcggagactttcttccggaaagatcgtgctcgctgcatgggtgggtggacgctaatggtgactctgggtgtgccttctgctccatttatctttggtttcgttgcttcgcgtgtgggttaccgttggatttactatatccttgcaattgtgagattccttaaccccaacctctaggatgtactcgtctaactattcattcactccgaacaggtcaacgcaacccaattcctcctctacttcttcttcggatcggaatcactttacgtccgcgggaatatccctaccaacaccgtcatcgccgccaagcagagtcttttcaaattccgccggatcgaccctacaccgttagaattctgggacttcttccaacctctaagctatgtgatgaaaccatgcgtggtcatcccagccgttgcctatgcaatgatcttcctttggggcagtgtcatgcttacaattgagatctcccagatctaccctgccaagttcggcctgaacacccagcaggtcggtctgcaattcctcggtattatcattgggtctgtgattggtgaacagataggcgggttcatttccgatcgctggatgctgatgcgtcagaagcggaccggagaaccatccccgccggaataccgtctttggttaagttatattggccatgctttgacgatctgtggtattgtcgttttcgctatcgaaatccgggactctggcggtgtatggaatatcgcccccgttattggcgctgctattgccgctggtggtaatcaaatcgttactaccgtggacattacttatgcggttgactgttaccgtgaggatgctgctagtgtgggtgtttttattactttggttcggcagacttggggtttcattggtcctttttggttccctgagatgtttgaggttgttggttgggctggtggcgctggtatcgccgttgctcttgtggttggtgtgagtgttattccgactgtcttggttcagtggagaggagcttcgtggcgttgattgatatggccgaggaaatataatttctctttttgtcaactaaatgagagaatgcagatgttttacgcagtagaagacggtgctatccacattttgatttacacaatagtattgggatttggatcatggagttctctgtattcgtggcacaacaggatatggaattgatactggtgtgtaatacgattccggtataatccttctactgaactcgaacccactgcatattaataccgccgagaaaaagtcccctttacccgtgagtagcttagcaatgactgccaattttctatctaatatttctcacttctgttcggcgctgcgtcgggaattgtgtataagttcattagcaattgccatattattatgtcgtagacggcttttagcacgatgcttactcccagactcccagtgcgctgaactgaatacttggaaagtgtgcgttggaggaaagatgccttggcaagggtgaatgcactcattgccgatatactgtcgccaattaccacgttcattcgaactgggttaagagagaaaagcctcggattcattcaatgctcatctttctatcggatatgccccgcagggatcagtcccggtttgcgtggccaatgccaaacctcggctcaatgaactgccattatttggatacacgctagtgtttcataattgccatagagaggggtgctcctgagggaactttggtccattccagtatctggtgacggaggcttcggccagtactagttagggctggggtcaggtgataatctacaacgcggggatgccaagagacatgtgaaaatacaatggtcaaacgaaatgaatgctgtgaaatgaagatgacataagtgtcgatctatcgtcgatccctgtggggaagtctatcgcagtggatttcctttagtgcggaaggtcgaaaatgtgaagcctcggttagaatgggatatcctaaatgtgctaaacgctgttgatgaactatataatccgggaatcacccctttaccctccgacataaaatatcccctcacatcatccaattcctcccaaacagcaacaatgtctacccttaacctcatcgccgattactcccaaatggttctatctcaccttccaggacccacccgacatctcttccgcaacccaacagcccaaaaggccgtcggaattctcgccgccctcaccttcctccgcgccacaaacgacttcttttcaagacgcaccctacaaaactggacttccaaccaaccatggatcccggcacgcgagctcatcctactaacgggtggctgcagcggaatcggcaagcaggtcatggaagacctcgcgcgcacaggcgtgcgcgtcatcatcctcgatattaatgagccaactttcacactgccggctaacgtcaccttctacaaggcgaatgtcagttcctcggcggatatcgcgaatgtcgcgagcacgatccgtgacaatcacggcgagcccacggtcttgattaataacgctggcgttggacacgagggggcaatcctcgatgaatccgaggagaatatccggcagactttcgaggtcaataccctctcccatttccttatggttaaggagttcttgccggctatggtgaaggcgaatcatggtcatgttgtcactattgctagtatggcgagcttcgtggctctcggtgagatggtggattattgttgcaccaaggccagtgcgcttgctttccatgagggactgcggcaggaattgaagtattggtataatgcgcccagtgtgcgcactaggtgagttattctcgggtatgtatctgtagattttgctaattattgctttagtattattcaccctgcgtgggtacgtacgcctatgatcaagatgctcacagacaacgaggcgcacttcagagagtctatcatgaccacccaggtcgtgtctgacgctatctgtaagcaaatcttgactcagactagtggccaggttcttctgcctgccagtaagtcggtggctactttggtgcgcgctatgccaacctggatgcaggagggtgtgcgcaatttcgcgtcgggttccttgaagaagatgtgtgttctgcagacagaggagaaggcccaggcgcagtagatattcagctttggaaatgactggagatgtgattatgtcaccattttgaattttatgtaactaactaggagatggataactatacgctatctcatcgagcgataatacattgatatataatattgaagttatttcaaaacgccgacggctcctatcttgatatttatgggctacagaagtcaccatcgagacacggaatatgtgtgtaaaacactctcactattccatgtgtacccaattcatgtatgtacagacagcgttccttcatacaatcacaccattaactcggccaaaaccgcctcaaccttcttcccctgctccgtctttgtaacatcgcccagctctaagtgataaatcggtgcaacatgacactcacgatacccaacaaacaattcaacattctcaaagccctccttgaactttgccgcgaagtcttgaatcagaggcaacatgatctcattcccgcctgcggtaatcaataccgagttcaccgggaacgccgtaaaccaatctgccggcgcagtcgataaatccgtgtaatagtcacgcttgccagcaccaatataggctgtcacccacggtcccgcaaccgccatcgtaatgatatcgccatcgctatagacctccatttccgggaattccttctcgagaagggtccacggtgcaatcatcactgcgccgccgaggtttccgcgaaaaggcaggggatcgatctctgcgtgtgggtgggccagatgagagagaactccaccaaccaggttgccgcctgcggagtcgccgcccaggaaaatcgtggacgggtcgcggtttggttgcgaaagaatgtatcgtaggcaattcacggcctgtcggagttgagtcgggtagactgcgattggcgccagcgtataggtcagactgaagacagcgacgcttttgcctaatgcttcaaggtcgtgaatgagctgcgcgtagaatttgaaataacccatgttggcggggagtccgaagccacctcctgaatgatggttagtggtggtcaattgaataggggtctttctttgctggctgtacacataccgtggatccagactaccacattgtcagcattcgaatcacccatccagtggcctaatgctccgtcgcccaagtctacggactcgggtagcccaccggtctccttggagtgttgctcatagatcttgtgggatggcggtaggatgtactgcatctgagtggcggtcagccgcgagctcgccttgcggaacagtgcatatcccaaatgcagggacaaagatttggcttggcgttcggtgcgtcgaaggcccgtcaagagagcatagacataggcaaccacgatggaagccacggctgggaggaagtccagtttctcttttatggagaggttgactttggttactttagtgacagacatgattggaatctcccgctcatgacttgaggccctaagtatattttagcccgtacaagtgtgaaagtgaagtgttgatcctctcgcaagcctaccccgtttaggaaggtgccgaggtttggaaaattcctcggtctccatatccttgagattagctgtatctcctacggagtagtatttttgcatctttagatctctagttctctatacccaggggtatcggggcatagatctacatatcgatatctgtgtagatctcacattcacatctcggagaacgatctgtgtaacttccaaggtcacttgtatatactaacttcaagaatcatcacgtcttacacgagataaacacgtacagagtaccactacgaatcccatgcaactccccgatctccccgtgtacattttaaggttttgcgtgttgtttaccccaaagtcgacggtgtcgatctgccgaataaaggattgtgaaaccgaggcatgtcaacttttttcttaaataacctcaatgctattcgcttttcagtaactgttcatttgatcccattcatccatcatgagtggactcgatgaaacaaacgaagctaggcacttcgatgtcatcatcgtcggcgcgggtatctccggcgtcaatgccgcctaccgcgtccaagaccaactccccggctacagctacaccatcctagaagctcgcgccgatctaggtggcacctgggatctctttaattatcctggtatccgttccgactccgaccttttcaccttcggcttccaattcaatccctggaccctcgataaccccatcgcagagggttctgccatcaagcagtacgtgcgcgataccgcgaccaaatttggcatcgacaaacacatcctctacaaccatcgtgtgtcatcggcagactggtcctccgataaaaacatctggtcgctcgccgtcgaccacaatgactccgaacacacatacaccgcccgctatgtcatctttggcacgggttactacaactacaaggatcccctgaaagctgacattcccggcctggacgccttccagggccaggtcatccacccacagttctggcccgaagacttgcagtataaggacaagacgatcgttatcatcggctcgggcgcgaccgccatcaccctcctccccaatctcgccgacgatgccgcccgtgtcacaatgctccagcgcagccctacctacatcctctccgtcccaaaccgctccagcaaccgatggctctcctacatcctctccaatgccctgtatctcaggttgcaacgcatgatctcgatctatacaacccgctatttcttcctcttctgccagcgcttcccgaatttctcccgctggttgctcaagttgaatgtgcgcaagcaactgcccagccatatcccctatgacccgcatttcaagcccaaatacaacccctgggaccaacgattgtgtgtttgtcccgatggggatctgttccgcagtctccggcagggcaaggcggatgtcaagaccgatactattcgagaggttacgaagaatggtattatcttgaattcgggtgagcagcttgacgcagatattattattactgctactggcttgcgattgcagattgtaggtggcgcggcgctgtctgtggacgggaagaagatcgacgtgggtggtaaatatctgtggaatggagtcatgctccaggatatgcctaatgccgctttcgttattgggtataccaatgcctcatggacactcggtgcggatgctacggcgcatttggtttgtcgcctgctcaaggagcttgagtcgcgaaagttggtcgctgctgttcctcggctgaaggagaaggatgcagctacgatccaggatcgtcctctcttgaacatcaaggcgacttatgtgtcgcttgctgatcggattttacccagggctgcggaccgtggtccgtggcgcccgcgtgataactacttgagcgacttgaagttcgctcagagtggtgatattgagaccggaatggagttcgtgcaaggaccgaatctgcggttacgtccgaagatgtcgtgattgatgcatgtttatgatatgatacctacccatgcattatgattgaggttctttgattcagtgtaaatatggtgtttgatgaggctcagtaacaatatgttcattcctattcttcagctgcgcaatctcccttggtgtccgttggactatgcatgctgcactttcgcacagcgtcacccttatcaactaatgcctatgatgttgcatctatcggattcgcacatacactcatattcccaaaataccacccatgattaggattgggccacctcaaatctcgatccgaaccagcattccccaccttgctattgatcccttcaatatactccaccccgtcagtagtgacctgcaccccagtcttctgggtgatccagtattcgggcgaaggctggctccaatcaaagaatggcagattgagcggcactttcggtatggggtctgtagtatgtgtggctcggtatatgctgtttggcgcttgttggttgctgataaactcggccagcttcaaatttcctggtttagggcctccgaatgtccactggtggtttgtatgcgttagctggaatctacactgcttgcttgttttccaacttgacttacaatatccagactgaacccttttgttcgaagaacagtccccgctaacgccgcaatacctccacctagactgtgtcctacgacactcagcctatagctcggatacgcgttcattgcattgtgaagctgggatgttgcctgagccgctacggcgctccagtaagcccagaacccatgatgggctttgcatccggtgcacacgtcgctaaccgaggtgagagcgatatcgagatctgtgttgccatcgcttttggataccgttccgcggaatgttaggacgatcagtttccgcgtgtggtctagggcgatgtaacctgtcgggccgtgatcactgtggaatgtgtcgattacggttgtgttgtcggctgctacgagtggacagttgccatagtcgcaggtcaaactttggcctgtgtgattgatgttctggtcgcaggccgatagggtggcgaactgtgagaatagggtgaatctttctaatagctccgttgagattgctggtacatttgatcgtcagattggaatttggaaaatttgctttgtccatgtgaggcttaccccggcgagctagttgaacaggagatgcaatggatgtcacgctcaatgatagcagtgcaagaatcattgacccaaccatattggatgatacttcgcaagtacagccaatctatcaaaggcgcctgttcttttgatctctgggaaatgagcttatatttataggtttcttttcccaccgtcaacaacagcccacctatggaatgttgcctaatagagaaggagtaatggccgcaggattcaatcccacgatgcaccgtgatgactgtataacagctgagttattggcggcactaaccttgcacccggaggatgattcgattctagagctgagagaacaaatgattatatgccattgaaacgatcaaaattctataatatgatacatacattccactcgtacatatcctataaaccaaaacattcaaaatatgtcacacagtgggaacaactcacagcgtcctcaatatgcataccagatgagattttctcctttccttcttagcctgctcccctcttgtccattttaggcaaatacatgaatttgtgattggtatgttcttcagctggcatgttgcatatttgccatcaatagcacaactaccacatgtgggctcaaagtgggtaatttctcgaggctagatccttggcgaggtagggatcattcttcaataggtgaagatttacatgcaggactcctatatcgagaatcatgtgaagattactctgtagatgtctcacagtgatgcggcccgcagatcgtacgctaatgcatctacaaccgatagatcgtcggctccaccttgcatctcaatactactgtagtattcaggtggattcgcgcatgatatgagtttgatccaccccgacctccagcatggtaaagacgaaccctcctagtacagatcgcctagggcatgtaagagaaggaattgtgactggacactgcaacgtcaagaaagggaagaggccttggatgctgggcatcttttcgttcatgtatgttgcatcatagccatattgctccgtataatgtttccgtataatcttccagcaagaaatagaatttgactttcggaaaagatttaaggttaaaccacagcggggttgatttcatcaattcaaccagggaacagtacaacctaacattccgggatgatgtaactcgatgacaccatttgatatgtcatgatttgaggagtagctaactataaggcgttgacttagccagtcgctttctcgttttactttcactacaccacactacaccaccaatttaaatccctcagctgtctcgatgccccccaaagagaaatataccgatcccgaactcagggatgaaatcaaaaaagaagtccacaatagcgacaaaggtgggaaaccaggacaatggtctgcacgaaaggtatccaacacgattacactcccattacgtatagtctctaacacacatgcaggcacaaatgatggcatcggaatataaaaagcgcggtggcggttacaataccacaaaggaagaaggccagacggagtctcagaaacacctcgataattggacaaaagaggagtggcagacgaaggagggatcaggtacggcgcgacaggatgatgattcgcgtaaacggtacctgcctaagaaggcgtgggagaatctgagcgaaaaggaaaaggacgagacagacgagaagaaggttgaggagtcacagggtgggaagcagtttgttagcaacaccgcgaaggcaaaggaggcgagacggagggccagttctgatgttgaggatgagagttagagggagattcgaagaaaaccgacgacgagaaaggtggggcgagaaccaaacacaatgcgaagcaggatgcaacaccaaaacagaaacaggatgcaaagtctacagaagataaagcaattcctcaactaagctcggttggctcctctaaatgcgcatttggtcgatgctattgacgaaacaggagcgagaaatccaaagggtaaatagcaaagtcccaagtaagaaagacttacgaatgaacgaaattgattcaatgaaatatcatttcaattgggatccatggtcttgaagctatacttgttttatgttcatatttggccaatcacgccaggatattaatcccaaatcatccatatataccattacatcatcttgacatatctcttcgatacaaaaataatcttttcacttacgttcctcatccacaaccgtgtggggagtgaattcgctatctggcaacatgttcatgctgtcctcctctgcgtccaatttgtaattggtggcccagaatccaataccgcccacgaaggcgaggatggcaaccacggtgtagttccaagtcaagagaggatcctcagccagaccaatgaaagcctgaccaatagcagacgagaacgcgttcatcaggagggacacggcctgcacgagggatcgcatgttctttggggccttggtgtaggcatactcaagagaagtcacggatgcaaggatctcagaaataccacccatgatgtaggtcagggcctggacccaaacggagatgttggtgtattcgtgtttcacctccaggcagtagttggcctcgttaccgcagggtcccagcttgtagatgtagtattgggtgaccgcggcaacgaccatactgagggaggccacgataaaaccagccgtgatacgcttcaagggggtgaagttgaaccccatcttgcgcagacaagggtaaacgagctggtcgaagatgggaatgaagatgatcagcgaaatagggttgaggttgttgatgatgtcgttgggcactcctccaagtttcatggtggccgcttgagacgtcaggttgttcatcatctggttataggcgagccctaaagatggtcagcttgtgtgaatatagtagataagaagtgtccacgtacagtaaagggggtaccacaaaaacactctgcaggcgagcagtcctcgtcgaacttcatcaacccacgcatcatcaaagtccatccacgcgggcttgttggccccgaagttgctgggcttggcggcggcccacatatcggtatcagagctccggaacctacaaggaatcaaggtcagtaggtgtaacattcggagctgacaggatgcggcttaccatcgcacggggttcagggtccagtggcccttcattgccaatttccacaccttgaaagctttggggtagattgaaccactgggaggagtgaggatatattgcttcttgcatatgatcaacaccgcagggcagacgcagaacatggcagtggggagaaggtaagagagccagaaaccaacatatcgctcggcgtagaccatggcgacctgacccacaaaagaaccgatgttgatcatcatgtagaagtacaggtagatacgggaaacggtggcggacgggtcaacgatgacacgctcaccggtagcaagtgtcgtgacatagggtttgtcttcgcgatattgttcggcgatcaggggggagatgttggacttgaaaccacccgttcctacacccatgataataagaccaattgaaaagcatgcaatggctccattggggcttgcaatcacgttgggaatggcggaaatgatgagaatggtgtgtccaagaagtgcgcaggcaatcgcggacaggatggtacggtaacgaccccaatattgatcagccaccatggcaccgaagaggggcataacgtaggaccagaacgagttgactgtgcaggtcacacatattagcaatgaactgaactctcgagaccacattacttacacaatgtcaatccggtcgaggcctgttggcccattcccagagctccgggtgaatcattgctccagttggagacacctggaacgagggcaccggtggtggatcccgtgggcaaaggtcgctgaatgaagttgacgactaattcaagttagccatttatcccctctctctaagattggtagtccatacaaacagcagtggtaccgtagtacgagaaacgttcgcacagttccacaaaggcaacactgtatgctgctatgggtagtttgccggcaacacggcgcaaagtggctagttcctcatctgtaggagaggttttatccagggaataatcgccttcgattgacgcatctcgcagaggaggggcactgtcgatggtcaactcatcaactaccgggcccttctcgttgataccgatagtgtgtgagactgccttggacttagcaacctcagccacatcgacaggatcgctggcattcatcgtggcggtttggggatccagatatagagtgaaacacacagaaaagaaagaaggagaaacctgcggcagggcgaggtgaagcacttatatggcccatggcgtgattagcataacggtttagctcgaggtctccaagcgtctcattcacgttccccccttctaggcattctagaatcccggagcaatagctgcattgggagatggcggacggtaaaaaccgtcaatagccggaagagaccctgcgtcgaggacttttcttagattacgcctgtcaggacgatgggtggctctcacgctgagattcggcctcatccggtctgagcgcctgggacgataagcaaagtccggcttttgttggaaagcgcaagagatcccggaagcctaatggacgccagaacttggatcagccaatcaccgagccggtcaggggctttgaccccccggctttgggatccacttggtactacccgttggacctagcgcaaacctagtttgtcttggcatggggcttggcacggcttggccgagtatctccccgcttggctggcaacttccattgtaaccctgtagtcttggctattccatctgccctatcacaagcaagacacggctgataaccgaggtgacatagctgatatccgagatatcgttgtccaagattgatatcgcctggtctgggacccaatcatacttatgtacggagtacctaggcaggaaagcaacatggcgaaaatgcggggcttgtgttgattaggctcaaggtgaaattgccactactttccccctggagaagtgagacatggtgtgattggccccatgttatggcaacatcaattacccgactcttttacaaactgctttcgcgcattgcctcttggaccgtctcttgggccgtctcttgggccgtcggtgtccgagaaccctatgaacctcatgactatcgagctgactacctgtttaattgttggaaactattggtctttctcgctgggcttacgcgatgcagtcttttgattgccctgccactttctcagcccgcgcatcgtcagatattctagggataatggcatgtctctttcaccaccgtgtaataagttgtaatatccgaaatcgctagagtcttgcaaagatccagtgtgttatccgtcagaacccttgtatttgatgtgaacgggcgatcacccggccgatctcaccacgtacatggtgtctagtcgtacggtggagtgttactcgcactcgaactgcacgggtaactccttgatcattggggcgttcatctggctccttgctcacttccactttcgtaccctcaaactcatgaaccccatgtttggcagatatgttcaccgcttcgtgggtggcgggcgacattccaaccttgcccgcttactctgcattgaccactactacctcggtgttcgtgcgtgttccactggcagttgattggacgataatatcactccggcggtacaaatgtctgcgtctgctgaactgcacgtagccaagttatcttggcctgccttgttttgagcccatatccatccccgtcgcgtgaccatatacctgcgtccttgcattgtcagattgtattcaaatgtctgctttggggaggctaaaatcgaaggcagcatggataacccggtaaagcatcttagaattttctttgaactgctaacccctgtttatcgcattggactaactgaacatgggggcattgtgtaaacaaaggtcggctctagttgcgatatacctcggtttaccgagatctatatcatcattttcatttttttcattttttttttttttttatatataatatatctcaatatctccccctgcgcctattttggatccttcatcgaatctctcgagctgacaacgatctagtcgaccaaaacccctgtcgatgctaaactcgaggacggccattgcccgccatgtctgtgaaacaaccgagaaagcccttccccccaacaatcgtatcacctcccaggaagacttcctccccatcttcggaactgtactcctgtctcgctgagcaatcatcccaggggtaccatagccgctggccaactgagaaatcctccatcgcctcttctcttacatactttcttgtgagatcccgacaaagtgccctcagtcagcacaatttctcggtactacctcgaatcacatcaactcatttacgagggagaaatatcggaaggaagcccgatcgctctgatcacgagatcccagccccgctccgataccagttcgcctcgacgaccccgtccaaatatcactcgaagcaccacgatcatcaagatgctaactagtcccatccctgatcgcaaagatgcctcttgaataggggcttctacaccgaacaatgagccttgtatcactctaactaagacctccacgatcgcacctttcttaggtccacgctgatgactttggtatataacttcttagacaattagatcaagttggtctcatcatcccaccccaatcgcaccggcattccttccgataaatcggcttcggaagggaactacatcttatctgaccaaaaccaaggtcctgattctcttcgagatgggaccgacaaccctgataaaggccaagatccttcccttgatcccaacccaactccgaaaggcaatcacacacttccttcccagaaagaacctagattagattactagactagggctgatcccaccccgatcgcgccgacggacactgcatcttttttaaacagtcacaccgatggaccgtagcctcttagaaatctagaagattctaccctcattccagtctagatccctaaatctctgacgagtttccactgggataatccccctcttatccatcagttagaggcggtatcatcccgtccagcgacgtaacatgtcctcggttgtgtttgcatacggaactaactctgataagtgctatgtattgccctagtccgtctgatatctacttgttctggcatcagcatataggtgctcgaaaagaaactgataattccccacttgcaaagccatcgacacaatggaattgttcgatcatagcaacccgacgagaatgccacctctgtcttaccttgagtcgaccatgagcggtatgttcgtgtatatatatctctaatagggacgtatcgatgaatgtgatgttcgattttactggaagagaatgactttccgtggtccgacgaacagttcataatgcaagctatgaagaactccactggtgggttgaatagtaaacaaagcgaggcgaaagttccttcgactcgaaaaataatctcaaatgtcatgatgcaattcagcctttcagccactctttagttcgtcacctgtcggttaacccccttctatttggaccgatcagagacaccatcttaggtctcgaatacacgggtaatgaattacgctttcaaatttatcaacggggtaaatcactacctcgataatcccgatatccaattcatctactttgactccgagaatgcggaaaaggtcaagcatctcagcgggtgcctttcgccgcactttcgattgtatcactcagtcaaaaaaatcacgagtggttttcctgctgaatgtgaaggcgtaattaatctgccttagtcgcgagaatcctttcagacgttgtggcaagagaaggaggggctggtaattgaatctagattccatgagaaccatcctttcaatgtattgcagggcaattcgattgtcattgccgacgaagatgggcatactttgccaattcttcttttccattggcaggatggcgaaagtcttcatctgaaaaaacaacggcttgcccaacaagctgaatcttttatatatccttgacacgaacttccagtcttgaagatggcgaatttggctttggttccatcgccatgaccagttattcacagtgggacgcatgaaatggtgctcgacagtccactcttcgtgcagcagtttccgcaaagataatggcctgtttaacatagatattgcacgcttcccctgagacttcatgcgtgttctcacgcaatactgtaaacagaaaggaatgtcgttgtttgaaaagaaaaaaactcataatcattcggagaacttcgtacgggagacgatccattttggcagtgagtgatagaactaatagaatcgggatacacataggccgcgcctatataagttcaataagcacatgtaatatgcacgtaatgacacctgagtttccgaaaaagccagtcattgactgcaagcgctcatcatgaatagttcacactgacctgaataatgcagtatattcgatatttgttggtcaacgtgaataaactcaatcttgcccaagaaacgagccgtcatgaccactcaggcacatcctcgtggctatgacgggattggggatgagcaacctatatgtatgatggatttctctcgatacatcgcaggtatgggggtttcctagggccacgttctcttttcatgtctctcatatcacgcagacctgctgatacagagtgtgatacagaagccatcaaaatgtcaaaaccaacctattgagttcatttggtgagagagctcttccaacctcatgtgccattggcctatttgcctagaaaagcagggtattcgaaaaagtacctttcaactcacacagtgtcatggtggaaaatggatatgccccgtaggcccggtcggaacattatttgtccgacgtgcattcctctcggcggccacctacaaatcttctggacagattgtactatccaagcactgctacacatggtatacatgagaaagattatttgcgcccattatcatcgcatggctagtgcactggccgatctgccgcttgaatttgcggctatgtttcttccactgcacctcagttgccagcagcacagagtgccgaaggtactatctttgctctatatcagaacaatttgacgactaccgatcgtatcctcgactatctacagaacctatttttcttcgacgcctcgcggcaacagcttacagatttcgtcgccacctaccaagataacgaagaagacggctcacccttccgcacaggattcgcttacaactggtacatataaacgactggccgccatcctgggcgatctttctttcaccctcatgcgccaggcgttcataaactacgcccccaaagcgaaacaagtcgtggtcatatctatcatcgtattatcatggtcttcccttcctagggacttttcacggatccgatattgtgcagatgttctatggggtcctaccaaactacggatccaaatctctacactcatactgcttgtcgtttgtctatgagcaggacctcaatgcaaaggctggagattatatgcattggccacaatggggtaataaccagtcgctgatgaattcttccatcgaccgtggtgccctcatgccggatgactttcatcaggatagttatgaacagatcatggcgatcctgccgcgttctatatgggaatacaagggagcacaagggaatatattaggagcttcacgaattatgtttatattatcctaggatctgatctgggatttggtctgcacggttgtgctcataaaatttaggcaagaattaatgacattcgcaaaattcagggatggatccatcgatctctaagcaaaatctgtgttcagaactaacgcccaattcagttccagctcgccgtcacagtggctgtacttccagaacacccattcggcaccgtataagaccgattatggtcgctttccaacgttgtagctgcagatccggctgtcttgaggaatttgtgctggatggtcattccgacgaggcgtgtgatacttgtacatctccatcagctgggtgccagatgaatacccgctccaacttgttgacaatgtgtaggaggatccggataacccggccttggaaagcactgtagtgaccggcgagctgcccgccttatttgtttgtggccatgaacaaagcgagacatgtgcgttggcgaagctcttaggtgaatcaacggagttagcagccagacccgatttataccttcgacttgtattaccgttatctcatctaggtcagcacaagacgagcttttgttcgcggtaatatacaccgatgtaagctttgcctagttcaaacccaatcggttaattagagcagacgaaaaagttccaaattcctttcagagcaccatggaagccaagaaacgtcgcgtccagctcacatgtaagccacctttcaccaaagtgctagttccgaggcagatctggcgggctggcgacggggataatttaacctggtgattggtggatatcagccaccaccccggattatgccgtaaaaataacaaggggcggagattcaacggaatcaaatattggtgaagttgattctaacgtggttgatctaagcgattgggatgaagatcaatggtcggacagtaagacctccatctgtctcggaagatattcgacccacctgaagagagcaatgatgggccggacatttgaagagttaacaatgaagccctcgagtagcgctgggattatattccaagctgacggtggtgtagcggggaattattggacctctgattgacggcatttctctcgccccggagctcattgtctctgaaacaatgtgctgtcatgcaagtcccacacaagtgcattgatctgccttggaattccaagtgcgttgaatccacttgcctgtccccgctataaaagcaggtgtcgcccccacaatcatcccaaaccaacttaccttctgacaccatgatggcttctcacttttgggctgctctttgggtgctcacacttggctacgctgttgtagttgcaccacagatattggtccctcgtgcgactggcagtctggacgcctggttggtgtctgagacagcagtggcaaaacagggtatcctcgataacattggatctgctggtgcctatgctgcgactgcaaagcctggcattgtagtcgccagcccgagtacctctgaccctgactgtaagtattggatagctatttgtggcagcggaaaactaacttaactggcctacagactactatacttggactcgtgactcggctctggtgttcaaaactctggtcgatatgttcaagaacggtgacagcggcttgttaaatattattgaagaatacatcgatgcacaggcctatatccagacggtatccaatccatctggagatctttctggtggcagtggattgggggagcctaagttcaacgtcgacgagacagccttcactgactcttggggtcgtcctcagcgtgatggaccggccttgcgagccactgcattggtctcgtttggccaatggctcattgtataaaccccgaatctgttggcttttgcattgctaacccatttaggataatgggtacaccacttacgcgaccaacattgtctggcccgttgtgcgcaacgatctctcctatgttgcccaatactggaatcagactggatttggttattacacctcaaattttagttgcgcacatttctaatgccctatagatctctgggaagaagtttctggctcatcgttctttactgtcgcagctcagcatcgcgccttggtggagggaagcacattcgcaagccaggttggttcctcgtgttcgtactgtgactctcaggctccacaggtcttgtgcttcttacagtctttctggactgggtcttatatcctggccaactttggtggtggccgctctggaaaagatgccaacacgctactcgccaccatccaaactttcgacccagaggccggatgcgatgacaccacattccagccttgctcagctagagcactcgcaaatcacaaagttgtgactgattcattccgggcgatctatcctgtcaactctggtattgctgcgggcaaggctgtttctgttggtcgatacccggaggacacatattacaatggtaacccttggtacctatgcacattggctgcggctgagcagttgtacgatgcgatatatacgtggaatcgtatcggttctttgacaatcacctctgtctctctcggcttcttccaggatctgtacagctccgctgcgaccggtacctactcctcgtccagtgatacatacacctcgattctgagcgctgtcacggcatatgcggatggatatctcagtaatgtggtatgttgcatgctatcgactattgaccacctcaactgacagatatcctaggaacaatacgctgcatcgaatggctccttgtttgagcaattctccaagtcagatggctcacaactctcggctcgtgacctgacttggtcctacgcagccctgcttactgccaatgaccgtcggaatgcgatagttcctgcaccatggggtgagacatctgccagcagtatacctggccaatgccagtacacttcggatgttgggactttcagcagtgcaacaaacaccgcctggccgaccacgttgactagtagatcaggcagcggaactactaccactacgtctgcgaagacaacctcgactacagcaccatgcactactccaacagccgttgcagtgacattcaacgtgattgccactactgtatatggccagaacatcaagcttgctggatctatctccgagcttggctcctggtccccaagcagtgctattgcgctgagctcttctttgtacactacgagcaaccctttgtggtttgtgactgtgacacttccggtgggcactgggtttacctacaagtatatccaggtggcgagtgatggcactattacatgggagagtgacccgaacctgtcatacaccgttcccaccacgtgtggtaccacagctgtcacgattagtgatacctggaggtgataactgaagttttggatacctcaattgaagattgtgcatgctttattcttctatcgtcgtagaatagcaccatgataatgattgtttatctgagtattagctgtccgaacacaaccaccgcctgtccattgtgtaggcgctgccgtttgaactattacctgatcgggctaaccttaccgataggctggtacggtgatgcggccgtcacatcataattatatcaaagtagtgaataaatcgccgcaggatgtaatgacggagggatgatgtgtgaggactccatataagatcaaattgagagccgatgaaacctgaaatcaagttctttattgtcacttcgttaaaaacgtcttagtcaaaccaacatgtcgacaacagaggaaagagtgaacgagatgcgtgggtacaaggcgtaagtactcacttttgtgatactcatgagcatatctaattagcaagtttatctttcatagcacgctgagcaacccgagagtttcagaacgggcaaagcagcatgcacacgacaggcttaatgagcttggcggtgataagcctcgcgaggaactatttcaggcaagaggcgatcggaagaaagacccaacgagggtcgcagctgggtataaggcgtgagtataaataagtcttgggatgttcttcgcatatgctaattggcctatatagcgcgcagcacaatcctaacgtgactgaggccgggaagaagaaagctaccgaggagctacacgaaactgttccggaggagtagagaccttttggttggttttacctgatatgtgaaactaagtgtgaaagtatatgttggcgtcacaatattatatacgttccaatgttatagggcagtgatctgcacagaagagacgatgcgttactgtaggagactaacacactttgtagcaggcttatattgcatacagtagtgaagttccgatgaacaaaatctaaatttgatggcgcgtaataaacagcccgccgaatgacgccaaaagcgaaaagccaagggaaacaactatagcacgtcagtggaagataccaaacgcgttagaatccatcaactcacgatatgtatgcttaagtcccaaaacatagcaagccaccaccgtctcccgcagatggccacttaggtgcgcgatataatttgtatcagccatcgcacgttgaataacctagagcaattaacatcagaccaaatgagcttcgccaagaaagtgcgtaccttctccgagccaggtccgtggagattaagtctcaactgccgctggaactccatccctagaacagaattggacgtagttacacccgccgtcatggaaaatcccacaataagcatatatcccgccgtcgccatagcaatttcctcaactggcagcatggcagacatggcaataaacgatgaggccgatgcgattcccgtgccaagtccaccgggaagaataaatagtgactcccagaagccgctgtgtccatcccagcggaggtaaaggagcaggtaggaaatggcggcaactagaccgccgatgacgagcagaattttgaattgtcccgtgcgccgaatgaatatgcccgctactaatccgccgagagtatttcctatcactgctggaatgagatgcacgcccgccattgtggtcgatgcgcgctgtgtcacttgaaaatatagtgggacagagaacatcattcccagctgcgcggagatctgaagagcgccgattatgtatgccaatgatacgttcgtacgccggagaatacggagattgaagatcggttcgggggctacgtaggcttccacgagcacaaaggtgatcaggagtaatgcccccccgcctgctaggaggactgtccaccatgagctccacgggaaggacttcccgccctggtcgaggagtgtggtcattgcgataatggatgagcctagcagcgcggttccgaggaaatcgacctgggcgagtttgttcactttggtggagtttgctttctcaccgacgttcagtttaacaaccacgagagctgcagccagagcgaggaacggagcttgtaggatgaacaacctgggatgtggtcagaaaatacatacagctatcggataagtggaaactcaccatctccatccgatggtatcgctcagccaaccacccaacggacctcccagactacgtccaagcgtcatggcaatgttcacatatgctctccaagtagcgacctcgcgctttggaacaatatctgtgatgataatggagctgatggtcatgattccggcaccgcccattccgctgatcgcgcgaccgaaaaccaccacccacattcgggttccgataccgctatacatgatcagatttgcatttcggctgttgggtcaggattttgcctacctcaatatacagccaactgcaaataacagatatgagagcagcaacattggcttgcgaccgtagatgtcactcaattttccatactgggcgataatcagaccttgacatgtctccggtgctggtcacgcccactcaccattggctgtgcagcacaaagacccaacgtatagcccgttgagagccaactagcatcgcgcagacgattgaattcggaggagatccggcctgccgccgccatgacaagtgttgcatcggcattggaaacgaattcgcctattttcgattagctctccggtcttcgtatatcgccaattttcgtaccgagcagaagcactgcgataattgtcccaacacctgccaatgctttgagcttaggctctgtgttagatggcgggagtaatggactttcttcgtcttgggcatggctattggcatcaatgccttggggtcctatgacacccgaaggccccggctcgaccgtgtcgctttcgatatgggccatgttgggaattcaagagcgtcgaactagaaaatagcattgagggggtgtcacctgcggataaatattatgcaatgtttagctaagttgtgctcatcggagtgataaagcacgccatatataaggtccactacgcgtacttcacgaaagaatacatacgatgttttataaaatggatgtagtcttttatctagtcaacgtattccgtacgatcatggctggcgtgttaactcacccccagtcgaccccacaatgagaatcaagtggttagtgccccctcaaggataagaattgtcgagcttccggagaaggttgagaagattcccatacgcatgcggatgaactttgaaactaaattgattggaataaaccaatgctatcctattcttgctagatgactaccagactgcataattcagtccatcttctccgcgacatgcagtcgattacggtaagggacaagtaacgatccgaggaaccgatggtatcccgatcgagctagataccgtacttgctccaatcgagtgtttagaagaagagctgccagtgatatacgttgatgaagaaggagtggacgagatccttcaacgagtgatcgatgatccagaggatatcgaggagctctccgatcaggagggtttctaggagccccgatgtcccaccctcgatcggacggggcagacgttcgaaatatccgagggaccctcgcttgtcctgatacaagagaaaagttgcttctgcaaaatcaccagaacccaaattcctacagaagaccagagacatcgataagacaacacgaagatccatacaagaagggtgcgaaaaatcgaaaaatcatgaaaaggaagacattctcaaagaaacgctcgacctctgagcctccttcgccctcgccttcccattctgcctcggggcatagaacaagaggcccaaacaatcgctcatcacaatgcctatgacgacccaaatctcccatgtctgctgcactattcaagaaccatgacccgtactgtctcattttcaagaaaattatccttgtgcaagcgagaagggagcttgctcttcagccacctaaggtaggtggcatcacatgttgctatgttgatagatagcccaatgccatcctgagcgataacgaaatgactatattttatattgttagcatttctagcctaggccagttgatggtatatgagccccattgatcttgttggtttggatgttggtcgttccctgaaagtagacccatgcttgagggactcgggagaaaatggtcgtcggcggcatcttgactatagtggatccaattgtgttaataacagaaaatacagaggaatgcagggtaataatacctaacaagatagacagagaaagttagatggaagttggatagggaacttctcgaccgatggaagaaaatcaagcatagtgtagaagtgacaaatagtgcacgtcacccatcattccaggttttatcttcaagttaacttgtatgcttttatctctctctctctctcccccccagtagcctcaatataccctggtactatagttactctcacttcaagttcacttcatcaccaaccatcaaccatcaaccatcaaccaccatccaccatccaccacttcgaactccccgtcacagactctcttcggacctactcatccactaatttatggctactccaacatactggccacggagtagccaacaatcggagcaaaaacgaaacggacaagggacaatgaaatttgaagattggctagacaatcagacaagtgaacacccttatttgcctagttgaccattgaatgggttcgaacatgaaaggaatccctacaaccatagtggctgggtttctagcaatattaagagtatagtagtatgtgcactcatagtcgtagttgaaaagtgacgccgtattccataaaatatgacagtgcatattcatttgaacgtctcgacttattaaatttaacattatttcaagtagaggccttggggttcatactatcacacagaactgaataaaaaacatctcagcgacgacgcgagccttgcattttatccagctttgccagaattcccactgcacctacagccccatatccaccctccctccagcaggtctcgatgatatcccgggcccagatttgcttgcccagggcgggaagcatatcccgggatggaaacctggcgacagagtcatcactgccactgtggtgatagagactgacactagtccgtctcccagtggcaatctcgtagaacacgatgcctagctggcagagatccgtccatatggaacaattataatcatccaccgcatctgccaggacggcgtcgatgggcatgatactcgacgcaccaaggtcacaaattgcgacgttcaatgaaccatccagcaggatgttacggctgagaatatcactgtgaatgacgcaagattggtggaggttatgaaggccgatggcaagctggcgaaaccagcgcttctgaagctcgatgctgggtcgtgccctgtgccgcagccactttgacaacgtacctccggacatgtatctcatctctatggtatctccggggaggtcgaggcaatgaacgatcccttccactggggtattgaagtcgggctgaagacgccgccagacttcttgctctcgtcggatcttgcttcggttctgttccacttcctccagcgtattattcttgtacaccactgccattttgattgccacatcctctcgttggacaacaactgctgcatcgccggtcgcaagtattgtatgaggcttgatgtagtgaccctcatcgtcgatgaggtgatacagagccctcatttgggtgatgtgaaagcgatttgggggaattgctgccggtggtcaatgtcttcgatgggagtagaatttctggggaactgtttatttttgtttagatgatctagctagcaaatgattagttagttatgatgtataattctgtcagaaggagaggtcctacctgaagtcaatgtatgtatttggtcttgctttcgacgaatagccaaagtccagggactcgctctcagaggcccgcggagtgaattctctgatttgaagggaaggaccgtggaacctgcacagctgggatttgaccctgtgcgattgcttagactgggatcatggcctcttggggatgcttgaatagagagataaagtcaagaaaccgccaaaggatgtttggttgaaactggaattggtggtgctgatttgatggcgacaaagaatgaaagcgagatgaatgaaagggagatcaatgagagatggtgcctttgacaagatgaagtcgcagtccattcatcgccgtttcataaaaaagccatgttctcctttcctttttcagaaaggattgagggtgaactgcccaggcaaggcatattttgatgcttgaaactggacaagattgcactggaaacacatcgtagttgaacctggaaaatggtcagcgggaatcatcttaatacgtgaaatcgcaaagtattgaacaatattcaaattgaaccctgctcacttgatgtataataacatgtagttgtatcaagacgaggagagctttgctgccagtatatgtattcatagaggataaagaaaggataaagaaaggtagagcccctcaggtagagagtcaaagcaaacaggcaagcgatggatcgaggaccttggcagcaaaaagacagatgtataaattattactgctttccacttccttcatgatcacaatatgcatatatacagcgttggttgctgttctcatctattttaatctaactgcttctataaattgcctcaaaacgcccatcacttaaactgaacttggcgcacatattcatcacttattcataattgatcgattcactgctcgtgcgtgagaacatagcggtatcgagcatcaccattctccatatcgacgatggcctggttcgcatccgtcattgggcgctcctggatccaaggcttgacgcccttggcaacagccaactctagcatctcccggatctcactaggactgccgataaacgagccaccaagcttgaggcccttgctgatgagcagggatgccgggatctcaagagcgccatcctcggggactccgagctgaataaaggtgccgtggagacggagaagtccacagtactggacaataggcatcttggaagaggaagcagtggagatgatcaagtcgagagagctagcgttgcgggtatcccaatccttatcctcagcggtagcgatgaagtcatccgcaccgagctcgatcgcatcggccttcttatcggatttgcgggagatagcgacgacgcgatcagcaccgagtgccttggctaacataatagcaaagtgaccgagaccaccaataccaatgacaccaacggactttccggggccgcatccatttcgcttcagaggcgagtaggtagtaataccaccgcagagcataggtgccgcatcggcggaggagatgccatccgggatcttgataacgaagtgcgaaggagagcggttgtatgtggaatagccgccgtacgatgtcccaccgttggcataggtaccgttgtaagtcatgaccatattatcgcagtgttgttcgaggccattcgcacaaggcccacacttcccgtccttgttctcgcatgagccgctctgcgcgccaacaccgacacggtcaccgatcttgagatctccctcggcatgtgatccgacgcggacaactgttccgacgacttcgtggccgacacagcaagggtagttggtggcaccctgtgaaggccggtgttagcaactgtattcgatgcgaatatgttcaaaatgaatgtgccatacccatccatccgcccatccactgcgcagagtgtgcaaatccgagccacagataccacagtgagtgaccttgatatcgatatcattctcctcccatggcttcggctcgaattcctgccaaaccatctttccttcggcggcttcagggccaaggcctacccagccttcgaacttgtaatcggtggaagacataataaaaatgtctatttgggttcaacggtttctgaattcaatggatgagatcgacaaaccattcctacagggtcctccactatttaaaccacctacacggagagatcagggtccgtctcggagcgttattatgtggcgacgtggtcagcaagtgaagaaaaggtccactcgacccgtcgagtggattgttagtggattttcatgcgtgggttgtcaccacggtcttgaattatttgcgctatatccggcgaagagatttcatttgaacgcaaatatgttgtaaatccccggcagcgggagagggaaggtagagtgaggcataccgtagacaatatcacatcaaacctacacccgaggacgttttcccacccgtatatcctccatgtttaccttccctgaggagttgctgctttacttccaagtatgcatgacgtcagacataaacccactaagcccctggcttacgccgacttatacccgacaagcttatcttgtactggtcgggtccattaggtgcctagtttcagaaaagaatgaaaaatgcttttgattcgacatgattctgttttagtggagaatcttcgcaggttttcatagccaattctatcaagctttcgcatccactccatccgaaggaaccgctttttgccggcggaaataatattggacacaaaggacaagagcaatgacccatgaggcaccagcaagggagcaaattgcggtcagaccatgcaagtacttcggcgcgtcggaagtgcggaagatctgcgagccagaaataccagcacagttggcagccattatcaccaacgccatcgcaacacttcgttcctggggtgtccggcagtagaatgacagccaaccgacattcaaaatactaatgtctggtcagcttgggttatagacacgaggggtatggaactcactgcatgctgcagtaggaaatattagcgatagcaataacgccgtaccggtgccatagcgaagcgtgggtattacttgtacgaagacaagcataggaaattacattccaagtgatagctaggagcacaaagggtccacggtgtctcgttttgtctctgtcggcagttagaatccatctcgtggacataatggtcatattaagcactcacgcagcaagagacagagcaattagccagatcatgctgcagtagacaggaaccgaagctaaagcgttcgccttaacggcaccgaaacccagggctttgatcatgctgggtgtgtattgtgtcagaccagagaagccggacatggacaccaaagtcaggagaacgtgctgcatgattcgtggctgtttgactgtctgccagatatctgcgcccgaaatctggatatggcccttggctttgaggggatcatttagtagaacgcggttacgaatgatgtgcgactcgcgctcagtgaaataactccagcggccgaaggtgatcaaggcacggccgtctccggctgatggaggtacgaggagggtgaagacaattgcgatgaagagggtcattaagccctggactggatgattggtcagaagagctcgggctgtataagatcgatctacacttacccaggaagatccatctccacccctccatgccatgggtaccactcagctgaagcagaccggcggatatcaagctcgctgtagccgatgcgaacatctgcccgtagaagaagagactggtgcgaacgctcgtctcctccttcttataccaggtagagaggtagtatagggcacctgtgggttattagccgattatccagtgcgaagataacgattgccataccaggaataaaaccaccctcacagaatcccaacagaatcctggtaaccaggtacgcaggatatgattgaacaaaggcctggaacgtggcaaccaacccccaagcgaacaattgacccgacaaccagacgcgaggtccaattcgctgcataatgatattcgatgggatctcggagagaacgatgccagcggagagcagttgggatccgacattgatttgattcgttgtgatattgaggtcttttgtgatagtcgatgtcaaaacggcgcttatatttccgcgatccatttgcaaggcgaagaaagcagctgcaagaatgggaatgatgatgaagtcgattctgaaagacacttattagtgaaatgttcatagttggtatagggacaagaactatatgtacttccgtcgaacggccggttcttctccatcccaatcttttacaataccctggtcaagctcacttggagatgagtcgatgacctgctcccctattttgttcttctcgtcgaagatgccttgatctgccatcttgcaatttgaaggagcttaaacccccaaaaatgaacaaaactggaaatatgtgtggacgttcaattcctatggagggctttacaggaacactgttcttataggaaaaggagaagcacaagataaaggattgcgtaagtcaatttagttaaaatgtgctaaacagcaccaactccgtcgagtgcgttttgacgcgacgacttcttgatgtcgcgagatggggagatatggcgcaatcacggatttgggatttgccaaggatctggggatctgggggttattggcctctagatagtgatgtggacattgaataacaggaatacttgaatataattgattggcatcgttatctacaatgtaaaattagcaaattaactacttctttacacccacacatcccaagacaccccgtgtcgactagtcaacggcacctgtggcccctcagcttcaacaatgtatcccgcatcacaccagtcaaatgagacatggggctgtgcgctatagaagccatcatactcctcatttagagcatcctggagagtactaaccgggtctaccggttgaaggacatcccacggatggatgcaagtcacaccctggcatgacttgaggaccatcaatagagcgtcgagtcgattgatagcctgggtcaagttgcgaccgagaatgcgcggttcattgagatcctcctgggaggaagtcgggtacagattattcaactggtatggatcggtctgcaaaagggttagtcgttgtgataaagaaccaaggtactatctactcaccgacatatcatacagttcatgttcattgttgcaccagactgagtaatacagactgtatccgtctccatgtaagcggacggatttgtaggtgttatttgggatcagggttgagcctccgggacctgccttggaattagtacttatcccacaatggccatgaaaacgttggactgaccaatgccgctataaataccctcaacaacagcagaaccccaatactccactgtaacatgttcatggcgctcaccctcaaactcgggcgtcatgggaatagcggtaccatcgaaatcatccctcggcggtatacccgcaagatggaacaaagtcggcgccaagtccacatgcgtagtgacagcatcctgcacatatcctttagccacgccaggtccacggatgaacaagggaacgcggatatcctcctcaaacccgcaagtcttcccgggcggcagtctgtgctggccaatatggaacccattatcggaggtatagataatataagtattatctagctgaccactctgctccagccgggtgacaagcccatcaactaattcatcaacaccctgcagggcgcgcagacgtgaacgataaaagtgatcgttgtagtcgacgaccgattggttctgcaggggtaggtcgtgaacccagctgactccacttggctacgcaagcaaatcaaatccgtcagaatttgcgaacacaaacacgttaatttgaatcagggccgcgcttacctggtccggattgaaattcgccgtccggggcactgtgacaccctggaacaaatgctggtgtcgttcgagggggacgggcgcggacatgtaaaagtttcccgacgtgatatcgccaggatcgacattcgaatgtggcgcgacaggcgacactgctaggaagaagggcctctccccggccagtgcatcatcgaggaaacccagtgcttttcccgtgatcacatcgatggtatgttcaccctcgtggctgaccggtggttcatggtttcgctggtaagtcgaattgagataagaataggtgtaaggatcgagaaggaaatccgatccattgaatccattgatgtgtgggctgtcgtagttatacacggtatgtgcgttgaacattttcccggtgtaatacgtatcataacccgccccttggagccacagcgggaggaaatcatcgttgaagccacgctcaacgaatttgggatatccgccgtatggtggatggacatcggtcacatttgtattgtgtgcctggcgaccggtccatagactcacgcgcgacgggcagcatagggctgttgtaacaaaatggttgcggaaaaaggtgccctggtcgcggatgtgtttggagattaggggggtataggagattgagtcgagttgcaagtcttggtcgtcagtgatgacgaagaggatatttggcttgcgcaattgtccttcgttgggtttcagtaccgattggaggactgattgcaggttggattggaaattgagggctgcaacgccttcgacggcgacgaggccggcgatggcagtgattaatttcattgtgtttgagaaagatcgcggagtagtacaagttgtatttgtatgcaatttataaagaagctatccaatgtggagaaatgtggagataacgatgatgccataaatggccccaatggcgggagataaagtgaagttattcagagtcttcactttgtacaacatcggacagtttattttcacttctatacaatgcaggggctccttgatgcttttcccacctccgattgattttagccaagccggacaaggtgggaagtatctaaacactcgttcatactactccaagtgccatcaagacagcatttttgactgactatgtgtatgtaatataattgggaatagatacagtagcctgatcaaccatcgagaaaacagtgtagttattcagtcgtgaatggacagagggagaggctctatcccgtgtgatgccttgttaacaaggcatctagccaatttacatgtggctaatggtggctaaagtcacgtgtgtattagctggccaagaagcgccttacccgaagtagtttagaccgcgtaggataagcatagttaccaagaatatcagaggctggcttccaagtaggatcatcatgcttagttcaacctcttttcgcttagttgcatttcgggaatcattcaaatcaatcaaacccaatacattgtgcaatctacagttcccttccctcggatcaattccatgaatatgtgcaataaactcttgctagctacgggggaaattgttgagctatgggccctgggtattgcgagatagaatttcaatatgtctacaattagtttgcttgtgccttgagcacctcgttctttgtgttcattttctctaggtgtagtacccatgattaccgccattcacatcagtttgaagtagtatcctcgttcatattacattagtagtagtgcattctgtatttagtacagacccgacacactaatataaatctagatgatattttatgatacgaaagggcccgtgttagattggaggataggtcaacttgaagatagaactttaaataacatataacttcagaggctaagagttatctaagatttatgtgaaagttatgtgagtgtcaatggtgtaagaagtacaaggttgtagttcaggtacactctcctgtatgattgcttttctttcatcagtatataagtcctctcctacatatccgacgagatattattcctctccatttctccgctgtatctgttagtcgatcatccccatatctaggtccagccctaaatatctgacagggcaagaaactaacaatatcagattcagagaaggttgggcgggtggccaactctaatatatcgagtaaggtgaccagaatatctgagtatggcatgttggatcaacggttagaaatccggaccttaggctcgaaaaactggagacaagagaggtggttagtcttgtggttcacttgtcactatgacgtgctagtagttgtgaggtgccaggtcgatcttggagagggaggagtgcattcaactaaatgactgagatgaagaaagatgaagcaagttgcaaagcagagaacataattatctttctacgcatgttcacgaccgcagtgaatattgtgtcgtcgaattgtattgttcgctagattgctaagcgagaaggttcgaagtttgcaacgtttgcaaagggtaagctatatcaaaaggctgtctggggccgtgataataatgccctgtactacgaagggtcgctttcactgtaaaaacaaaatgtcaatattcatagtattcaaatgacaagcttcacttttaatatatacgcaacgctatgccgaatgtacatccaaatcaaagagaaaagctactttgacagccaaagcggcttcataatagaccgcaaataaaccagtaaaaagaccagcaagtagttcgtaacggtaaaagcaagaaagataccgaaatacggccagatcttggaagaatccagaccaattccagacaaatactgccaacgcagattagcatctattccggataagacaaaacatattccaggaaacaaactcacatcatcaccaaagctatattcacaatatccacattcgcccattccatccgggttggagagatacccaacacctttcgcatcaagccatgggcccgcgtactcactgcaagtagtgttgggtggactctcgaagatagtcaattcagtctgagagcaaacgacagcagtaccacggagaacggaggtgagcaccccaccaatccagtacgtgaacggtgtgatgtaatacattgtatatttccaaaaggcaggcatctgagattgcggacggaggataccgttgaagagctcacacatgataatgaagaagggcatgagggtagcggcgatcattgagtcggcgctatcgattggcaggatgtgttagttgattaagtcactgcggacaagaaacggtgcttggttatattaaactcacctcagagcggcaatccactgaccccacgaggtcgcaaataggaagaaaaggaagaacatcaggaaacagtagccggctgcgaagccgagtggtaatcccaccataaaatagtataggacgaagaagacgacggcacccagaacggaataggggatctcggagatgatctgcgctgtgcagaatgctacccagccgtatacaccactcgggccttctcttgctaaccagatatcgcggttcatgatgaagcgcatagatatagcgttgataaactcgggaaccagcatcaggacaaggaagcaagagaacgcctttgactggaggtccgtcgtactattgccgatctggaggtaggtgaggccgttgataagagcgtggaggaaggaagagtaaagacgcgagtatgggtactcggcggtgcgccaaaactggcgacaggtccgttgagtgaggagtatgatctgctggctgagagggggtagggttgggggcagggaagggggacgggtattcttgtcggagcgaattgaagcgatctcgttcttgacctcggcgaattcttctgagttgcgccagatggctgcccaattcgtagggtttcccgaggctttcatgccgccgacgactacttcgatgaggaaatcggctgcgttggtgactttttccggaatgttgccgtgtcttgcgaaatactcgaagattgcgtggccagattcaccgactgggccaaagtagtatgtgcttccgccagggctcagggctaagacgcggtcaaactggtcttgttaatattgattcgtaagaagggtgtttaatgcttacctcttcgaattgctgctgattagcctgatggatagtgcagaggaccgccagtccctggttggcgagacgtcgtagcagagcgacgatactagttgcgccctggctgtcgagtccacttgtcggttcatctaagaaaagaagcaagtttggccgagcgcacagctccactccaatagtgacccgctttttcttttcaatgtccaaagacccgatcactgcatcttgtaattcaaccaagtccaatgtgtgaatcaccgtttccacgtatgccagcttttccgccgttggaacttcgtggctttgtcgtagcagggcagagaactcgaaagcttccttgatcgtgctgctttcgtcgtggatgtccatttgctggcaatatccgatctgtcggttgaaggactggtcaattgaccggttgtccacgaatagagacccggacaagatgccgggactctctctttgagtgagtgcagtcaacactaaaggttgtcagaaatcaagcgatggattcatttcattgtgatcttacatgtagacttgcctgctcccgaggcaccaacgagagcagtcaaagaccctggtttgcagtatccacaaaccccatccaaaatcttcctggtctccttgccaatctgcacattcagctccaagtcagaccaggagaaagtagactcggtagctgtaagagtctggtcatgctttgtttcatgaccaacaggtggcgctgcagaatcaatcgagacaggcgattcctcttcatcagacttaactttcttctcccgcttggacagcttccgcgagcccttgtattggatagggccagcactatccagctcccactcaagcacctcactcagccaacaggtcatcccaataaaggcgactgtgaaaagacagagaatcccgaaattacgccagacgttgctgtagtagaatccatatctcgcagccaagtagtcatcgccattcacgacagtgctgccaatttgactaccagcataggcacaggtctgatatgcgaggtcggtatattccgaaccggatgggataatggaggctgccgcgcaggggaagttaacattgtggaattcggcggccatgactgcttcataggtatacagagcaggagttgtatatgcaatccatccaacccaaggaacatcttgaatcattttgtcgacggagagaacgtagccgccaaacacgatgcaaaacataacagaaaccccacagtagcgaagagcaacttcaaagttctgcgatagagcggcaaagacacggaattgcgccgtgaggcaaagcgtactcgtgtaaatgaagaggccgtcgatgaagaagggaccggcctggaagagtcagcgtctatactgtgccaagattccgagattactcacatcagaccgtagaccggacaggaagtacatgacaaccaaatacaaaaaagtcaaaagcacagttatcaccatatctgagagcactcgggccagacatacagcgctgggccgcacgaaggcgaatttcttctgtcggctcaggatatcgcgaccctgcatagcttcttccaactccgacatctgcagccaggcaagcaaaatagaagagtagaagagcacacctccacgtgaatacataccctcggtagtctgaggctgatcgtagaacatagacccaatcaacaacccatagaccacgcaagaaattaatttgatgtatagcgggcccatatgccctttcaactgccacatctgacgcttggcgcaaagaacgacctgtcggaagagcgaaatcgtatatggcgacttagacgagacaaagcgcgacttgtcattttgcacagtcttcttgaatacctccacgctgtcgcactccgaatccgccggatacgcactggaagacctaccggacttctgatcttcgtatctttcgacggccgtctcgatgttagcgaacgcagcactctggcgaaaagcggcttcgagttcaatggggcccttcggcgcacggttttcccatccggcacggaagcgccgtctttcgggcagggtgatactggtcaggaaatccgaagtagtctgcatatcagcgcactcatagcccagatcttcgaagtaacgcttcgcctcgtttgcaggcccttggtacagcatgcggccttcatcaatgagcagcaccttatccaccagctcgtagatggcatccgaggcctggtataaagtaagcaaggttgctttgccacatgtatcggtcataatacgcagactgcgtgcataatcgagtgcagaggatgcgtccaatcctctcgtggaattatcccaacatgctactgatgaatcggtagcgagagattcaatgatagagatacgcttgcgttctcctccagacactccgcggatatactcattccccaccaacgtgttcatggtatgtgacatgccaaaaacccgcccatagatctccaggtaccggggaatcctctcccggtagcgtttgggagtcttgctctgcagtgcaaactcgagcgtttgacgcacggtcagggtggggaaatgcacatcgtcctcggggatgtaggccacggcgccacggtagtgcttcctaacttcatccgagctgagaccggagtaatcgattgagcccgtgacacccagaaaggaagagtggtggccagcgatagttcgcagaaaggtcgaacagccggcaccaggacggcccagaacgctatatatttcaattagaccaagttcggtaaggatgagatggcgtttgatttcctgcttacagcatgatctctccgctctgcacgactccggaaaaatcgcgtatcagcggacgcccatgctcgggcatcttcttcacgatccatggctggatcgtccattcatagacatcctgtagggtgagggtccgccacagggctgtggcgaaggtctttacatctgcgtgggagtctccgtcgccccatgttgagagggattgaaaacagacgccgaggttggcaggtttcttgccctggacttgttcctcgaggaacttgtcgaaggaggagtgcggttccgggtacttgggatccgggtggctttgagcggttaatgtgtgatgaatatcggcgagggcatcttcgtcctcgtatgagacctgcactctcggcggttcattgttgtgtttctccttggcaaaggaagagctatgcttcaagtggggatgaagaggagcgggcatattgatccttcgatggtcgttcggaaaatccagacctcattgtactatacatgaagaaattgcacaatcttataaagaataagaccaagaataagaatttaattcaatcaagaaaaaaaggtacgaccacatgtcccgaaaaagaagccaaggctcatgatgatgaacctggatacgaccagccaatccggtggtcgatgagaaagtcaagatgttgctgatggggtccaggcgttatctgaccatctcggtatacagccaatgacagtggcaaggtgggtgcaacgaaaggcggttcgttcttttcaccaattctggcgaaggccttgaatataatacaagcggagtccgcggccaccgcgcgattgttttgcagaaaagggaagccaaggcgagaaggatccaccgaaccattcgagagccaccgaggaacattggaaatgaggattttctattaaccgtatattctggcatattatgtagacgagcctagttaggtctatgtatactctctgatcgagatatagtatcttccagtctcgagtaatttcacaggggcattgtatcatgtcaacccccacactttcctgcagaatgacatttacaccggagaatttctcacgtggcgggcttactaatatatgcacttctgcctcaggtgtcgaggtccttatctaattcccaatccggtctagcgccaccgagctccaagttccccgtctccaaactccatattctccccctcactaccccaaaatgcaagctctctacaacgctctaatccgcacccatcacataacctcccgcaaaaaagtagccgcgctcaaacgagccgcagacacacaccaatgcgccgtactcctgcgctccggcgggtgtccggggatcatgtacgtggagggcggaaaggagccggtggagagctgggtggatgttgtgcgccggttacgatataaggattttcaattggttacgcgacccggcgttgtggaggaggaggatggatatgggactgggaatggaaacaatgagaagagaaatgagagagagttggatctcccgttgggactggatgaggtagagagtgtcaaggagtttggaggcattatggcgaggaggggggtatggaattggtggaggagaggcatggggtatgcttaatgtcttcatgtggatttgcattcatgtactgctttctgagatatccagttgaatttttggtttctaatacagtgatcgtcgttgattcatgtcttcccttgaaagaaatatatcccaaacgccataatctacctatactacatatgtatacaattaatcaaggtgcgtttttcactcaaaccggcgccggataactgagcagcttgcagatatcctacgacagttagcaacgagccaatattcccccatgactaaacatacctttcgttgtctccgatacttatcatatatcatcttccagatctctcgatcccgacacccactctcctgcggcgtgccaggattgttatcacacttcggctgctcagccgccaacatgtcctgcgaccacataatccacggcttcggcagcggccaatcggaaaagtgcacaaacttagcctgcgccaggacatgatcagggtcccagacctcatcatcattccccaggaacttgcgatgatccttcgtccggaactcgccgctcaatagcccatactgccgatgtgggaggaccattgctgagtccccatatcgccgattcaacagctccatatcataccgatggtccgtcaggtttatatcgacttgaccgttctgggtgggtgcggtaacgtcggtcaatgcaagatattcgcggagggagggctcaatgacgaccatcagtgacgagagcagtttgtccggaagaagccagtaagcacgtggcatggcgacagtggtaggcgggaggaagaagagctcgtccattgtctggaggaggataacgtcggagtcgagatggatgacacggtcgtattcgtgctcgccgaaggccatgagcttggctgtgctagtatcccacgaagccctggaatcggagtctataaagcgagtgacatgtcagtgggtatcttcaagaagctagaatcggttccaacagcggcagccgaactcactggatccatcctgaactccctcgatcttgatcgggatcagcattacattatacttgagtttcgcctcaagcagcaactggctgacgcggtcaaactcatcctcgacaatgaggtcccactcctctgggtaaaacaagacacgttccgccctactgccgagtctgtgcaaagcctcgaagaccatcaggcaattgcacatgtagacctcattggttgcatactgagtataggcaaagcgcgaccagtcgacttcgtcgtagtggatatgtggtaggggcagcggcggggggcgttcacgccgttgccacagaataaacaggacgatcagggcgactgtggcccatgttcggacgcgtcgtagctggcgcttggctatggagagacagggttcatcggggatatcgaagaagtcatcctccgaggcattggagctccgtcgataggggagggcgtaatttttgggcggcattgttagaggctgaagctattgacagcgcagtggtgatttggatagatgcacgtgatggttatgtaatcgttattgtgaatgcattctgatgctaaattggatttgatatcgaaggctgagaccagcttgcaggcttgagattgaacattcaaagttgcggggagggcccacctcttttcaaagttggagcaaccgtggaagatcgcatgccttccaaggttgtatatactactctgtacaaactattttctattttctccatctgtccaggcatgacatacaaccacttcgtatacattactggtggtgatgagatcctcaatcgttggtagcatggagtaacagttccagtttataaccttctagtcgggtgtttgcctacgatggtactcgaacgaatttctttattctaatcatattaaccagcagcttggagtgacggagaaaaaggtccattggtgataactcgaaaaaaagcgaagtcaccgcgatttccgcaaaaagacaaaaatagtttccctgggaatcgaacccagaacctttccggaacatttgcgaatcgcatttgttaacggaaaatcataaccgctagaccaggaaactgctcgaccacttgggccaattgatgaatgggcaggcgaaaaatggcattatgtctaatctttgaggtataacgtacgaacagtatatttttgtctctaatctcatgtatatcggtcgcattttaatttcatttctcctactgtgcctattctctgtcagtttcagtcactatataacccagcttaattggggactgccatatacaccgagttagttgttcattgagcaacttgtatggtagtccacgctagatatatatagaacgcataaataaagcagctgccacattcaactctccgctctttctcgtttgccactaaggagggacgtagtaggagaaaataattataatccaagtgcttattatataccagagatctatataccgtaaatcaatgaaatcccccaaaatgagattcacccccattaggcaacaacctcgtcccacccgaagagatcgacctcccatcatcaacttgaacaacaatatctgtcttaatagtaacacatccatcatcatgatggtccggcatctccgccttcgaaatctgactgacagagcgctcatgcccatgtccattccagtgatcctcctcatccttaatataagtattggtcatattagtcactgtagccgaatccagccactggtcctgaacattaacgcggcgcttcatctctgtgtctggctcattatgtgcggttgaccgagagcgagaccagtagccgtgataccggccctcgcgtctgtggtcaatgaaggaccggaggaagaggcgggctactggggcacaggaggcgaggaggatgctgtagttctcaatcctgggagtgttggttaataatactgggattgggagatggtagttgtacttactttacccagagaacgaacgtcacgatattataggtgaagtcttgtctgtcaccaagcgatttgagtttctagtgaatgatattagcgctgctgtgtaagtcgagaaaagatattatactcacataggtctttacaatagaagcacagccagagagcaagagtggtccactgagcgtgatggtctgccagatccggcgggatcgaacggtgccattaattttgcggaattgagaccagaatgaggtgtttggattacggtggagggttcgcaggaagaattgccagagttcgactgcagcaagcacggcaaggaagaaatcgatcacggtgttgaatcctgtgcgaattgcaattagctttgagctgagctgctgaagtatataattttccatacctccttgtacaaagcctactgtcgtttggacaaccggtgattggcacttgacggaaccatcttcagggagtggtgtccacatatagtgaaagtattgtactcgatcagtctgctctgagattagaatggaccaagcactaagaaggaggatactaaccgtttgatacgggttcggtccgcactggacaataatctggacgattgtaaccatattgacgacaacctgaacaacggcgcagacgataatagattgtcgaatcttcttgtcgctggctgcaaagcaagtcaaaagaaaccacatcatgcctgcgcgtgacaccattgccgaagtgacagccatcggctgtgaaagaaagtcccatttcatagcataaagacgctcttccccagttaagtagaagaaatgtctcccaaggcccgagttggcactagacagagttaatggctgacctgggaggaatgacactagtcgacctcacctcatttgaataagtaccatatgagtgatatcaaaaccccaagccacgaggaagaataagtcctctgtaccccaaattcgaccaggtgcagtgacctgcggtaaagcccaacgcacccagatcttgatagcatagcggaacaacaatgctacgccgacaatggatgtgaggacctgctcgaggattagtatacatatatccagaggcaatttataagatcaagatcatacccagcaagcctgaaatgtgccggttcctgttaaacatgtcaatccacgatcctctaggtccatttgcttggcatttgccaggtaaacataccgatatcaacatcgccctcactaggtttcggaatatccataatgaagataaaacacaataaccagacctctcggttataggcagggatccaattcaaatactcattggcatatatacgagacgagaacgatgcgcggggtcggtcagatggatcaaatgcgaaagaatataaaccaaatccaatccagcaccaagggatagtagaggagagcttttaagttgcctttaaaggttattagaaatggagatcctgtcaaaagtctcgcgcgaaccggtttacaggtcagaaacttgtctagactcgtttccaacgggtggaagggcgcataaacgtaaaatgatcgagaggaaacaagggatgcagggcaaatcccttgatttacaatgaaaatataatcgggtcaagcgaagcgagttgtatgatatggcagagtattgaaccttgatgtacggggtcagaaacgtccagttttgacttatgacaggagttaagctcgtgtggccaatctgcgtgtcagaaaatatcccatccttttgatcgtggcaatggacacttcgcattgccaggaccatgtggatcaagcacaggcgacattccggagagggatggaaatcatgcaatggccatgtgagatgcagtaagggatgtgacggagaatgagaaaaagaaatacatcaaatacacatccacatgggattgatggattcgatacacccctagatcggatctgcaaagatctgctgagttcgagagataaaaactatatgcacgtaagcgaaactattgattgaagggatgtgatgagtatacatcaagaaatgatatatcatattgacaaagaacgattaacaatgaactagtatcaacaaccaaccattaaccaattgaattaaccagtgaattatatcgctcaaccctgaactaccgatccgccctcctcatctccaccaatgactcgccagccctaacataaacctcaaaagtcacctctagcccacacaaccccgccacctgcctccactccaccgaactcctttctcgccccccatacatcgcaatcatactcgcatgaagcgcagtataagtcaaattcttggcgtactcaataatcaaaactcgcgaaccaggtgtcatagcacgcgaaatcttctgcagcaacgctacagcatccaaatcaggcaaattatgcaagatatgttgcagcgcgtaaacacacgcaccccgaacgggctgctcagcctcatttttgtaattccactccataagacgcacaccaggcacatcatcgatatccgcattgaactcctgcacgattagatcatccacaccgagatgcggatatacggcctgaacctcaaggaggagttcgccacgaccgccgccgatgtcgaccatagtagcggagccagcgagggtgccagtggtagtgtcacctgccaaagcaccatctagatcatagcccatcgatttgacgcgctcggggaatgttccgaacttcaggaacttgccgaccatgaaatggttgaaactatccatgcgaccctgagcctccataattgagtacgtgtgctgctttgccagctcagactgacccattagctgataggcgtattgcaaggggccgtctgcttcagcaaaagggtatgcgaattgggtgtctcggagctttttcatcaaaaatgcgccggccattagaccctcggtggtgctggatggggttagtgcgtgcttggctggttatattgatctcattatagaaacaggacatgcatgggggaactgacaagtgcagtgcgccatgctgggcggaaggcatggcgaccatgtggtttgtgatggcatttgctgtgaagcagtcctcggccacgcgttcaactaggccgagtccggccataatgtagagtgtgtccgctgcaggaatgcattagcatatcattgggatactgcttgtacctatacctgtacaagggtgtgcttacaggctaatctggtacctatatccattgtcagcataacatctacaacagccatgataacaagccattatccattcaaactggaacacgtactcagctcgggttcatctccccctcgggctttgatgcgtgcattgcaggtagccgagacttcgtcggccgtcgcaggtcccccgtgacccacgaggatattgaagagatcaaagtgaatcgcgaccgggacaaatcccaacgatgcaggctgtaactgaattagatagaagaattatctgacagattcatcagactcactactgtgacggttgctgcgagtgcggcgcctgggggtgcaacgggggccgaagatgacaagcccagtaggctggccaagcgggtgaggaaggacattgcgttcgtgaagatttttgagtatgagaatgacgggggaagtatattctgattatactctaaatacatcatctacaagtacaacatacggtgggatccggcagcaattccgatactagggtgagaatacaaacggtgtatatattcaatttaccatgcctggaatactacagattataacacatcaactcctgattcgttattatcatgggattgttgcgctccgtggaagatcattggttcaatgtgaccaagttgggtatgcgcaagggataccacaccaatactccgtaggaacaaagaactaaagcctagaaaataaacccgcgaataggaatgtccaatagcgaattaccctaaggcgaaggatctactagccccgatctagctttatgatacatccactacacgtacggagtacattccggagacttttcaacatatccaaatctgaaaccgattagggttcccctctgatgtctctgaattgataaagactagattctagaatctccctgtgcaaaaaaagccacgcgagaatctccatgtgtattcgaaaaacccgccgtgcataaaacctacggtgtcccgtcacgcagaaaagaaaaagatcttcatttacctccttacctgaccaaagtacgttgtcttggggttgagcttttacactgcacagaatacaggcaccaagaagtgcgagcatacctaccatggagaaaccctcccctgtttactttacgcaggagatggcagctagtgcgtcgtcgtcgcttgagacacatgaactggaggaatgcgatttcgattcggacctcgaggtcaaggatcccttgaacccgagaaattggtcatcggcgcggaagaccatgctctttgtgtcgctgatgacgagctcgttgttggcagatgggtaagtatacccggtcgattgtgaaacccatcgcggctaccggctgagatgtgtatgcataataactttctgactaaatcttgcagggctatggtatggggtggaaccctggtcacggagcaggccatggattggaatattaccatcgctcattcggcgactagtatgaattatggcatcctgctgcaggggtttggcggaatttttgctgttccgctcattgaggcgtatgggcggtgagttgggtctttttcgcccacgttggctgtcacactgacagctgaatgtagtttgccgatctggctgtggcctcaggtgatcactatgtttatggtgctgggtgccaccctctccaatgattggtctaccttcacgaccttccgctctttgcagggtctatttggcacagtgcctcaggtaattgggctcccgatcattcatgatatgtatacctcggctggtaagtattttctgtgggattgtctcgagtaccttatgctgatctgacaacagaatggccgcggatgatcaatatttggtaggagacttgccactcaaatttagggtagcactgacttgagcataggggcaccgccttcctcgtcgggccattccttggtcctgcgatagctggatacattggtgccgggtcagactggcgtatttccttcggggtcctgacagccatctatggcctgtccactgtcatggtgattctcttcggctatgagacatatcacaagcctggacgaatgaacaatcagtcacgactcgcgtcttattttggcattggaaataccctgcttcccaaggtatcgacgttgatatattggagccgaacagtcgtggtctatgtgttcaagttcccgttgctgatgactggtgcgtatggtcgacctagcttgctatgacattcactaaccaagcctttgtcgataggaatcgctatcttggtaacattcacttggccgattggtaagtaaccaccatcacaccgttctttcacctgctgactgtgcaggaatcacaaccaccatcgatagcttcctgcacagccctccatatttgtttgacacgatcgaggcatcatcaatgcgattcgccggtgtgattggagctttatgtggtatgcatcttcaaagcacctctctctctctctctctctccggattcttaccatctcacaggctgggcatttggccacttcttcaacggctggatcttcaagcgtcatagctcaaactggcgaaccgagctccgcctccacggtgtctggttcccgataggtagtatggcaagcggtctcctcacctacggactaaccatgcactttggcaagcactggattgggatagccattgggtggatcatggtgaacatcggcatggtagccacggttgtgtaagttccaaatccactctcctgagtactgtcgtatgtctaacatccattgctcagtgccatctcggcctatacattggaaaaatacccggagcaggcgacctgtgtctcggccattctgaatatgtggcgcacctgcggcgggttcgcagtgggatacttccaacctgcatggattcagcgcgatggcctcggactggtctttggcattcaggctgctattctgtgtgtggctgttgctttgactatcactcctgtgttgttgtgggagcggaaaaggcggctgcgagttgatgctgaagctgatccttgaattctaatggtgtaaataactgtatatgtgtgatgataggattgcatttggaatattttgtatttatttttgctcagacaatagaatacgagttgtgcaataaggatagttgatcaagagggacctcgcgtccaaccctgaaacacacgtgactggtgcctaatccatcaggccacaatcccgttgccgacccgaacacgtccgtgccgtgtccgtcgacgccagtttcatgcttaatctattcaacgccatggctggctgctgtactccctactacagattaattgacatcaatctcaaacttgagacatgatttacccctgatcttcagctcctgaatctttcccactaaccaacactcctactctgtacggggtatacacagtcgatcattgcctcgctatgcaaagtcccgcaagcgatgacgcttcccgtggggcagcggtctgaaagacgccaccgtttatttggcttatgtgccgcgtggttgctgatcagtccccaatgaacctgttgcttggcctatcaaagatccctcgttcacctcgttcagaggttcaaccatttctgcctgcctatggattatccactgttgccgaggcagtgtcaaactcgtttgactcagggactcagggacagcgatccctgaccctttttttcccttccgtgctgtgaaacatttgttacaaccttttctgtcttttcccaccttattctcgttagctaaatgacatcggttcctatttaatctttagattgtccttgagcaccaacccgactatgtctagttctccgcgacgatggctcttcgtggtctttccgatccttatattctgcatcatatactacctctttcgattgcctgaatccaacccgacaatcgtgaacaacccagaacaaattcctcaagcgggaggagaaacaattgtggtaggggaggggacaagtcctcctctaatttcccctcctaaagaggagacagtggaggagaaatgtggccatttactacacgcactcgacgatgtcatggtcatcatcaaaaccggtgcgaccgaatcccttgaaaaggtccccatccacctccgcaccacgctgaaatgcgtcccgcactttgccatattctccgactacgaagaaactatcgatggtgtccgcacgtatgacgtcctccgcaacatcagcgaggcaacaatgaataatgaacccgaattcggcatctaccgccgtcttcaagaggtcggacgtgaaggcttgacggacgcagaatggggcgacgacacaaacggcccactaggcaaggtcaataacccaggatggaagctcgataaatggaagttcctcccaatgatcgacaatgcactagaagtcatgcccgatgccaagtggtacgtcttcctcgaagccgacacctacatggtgtggccgaacctgatcggctggctggcacacctcaacccagatcgacattactacctaggaagccccatgcaaatcggcgaaacactcttcggctacggcggggcgggcattgtcctctcacgctggacgatgagcctcctgcacgaataccagatgcgggcaaaggaagatctcgaagcgatgacggcacacgagtgggctggcgactgcgcgctggcgcgagcgctccacgacgtgcacgtcgatctggtttgggcctggccgatgatgatgacgtcacggccgtgggaaatcgaccatttctccgagggatacgggcggcaaccgtggtgttaccctgctatctcataccaccacatggcgcccaaggatatcgagaagatgtgggagtttgaccaggcgttctttgctagtgggaagaacgcgctcatgctgcatgcagacgtttaccagaaacttgtctacgatgggacttgctcggcgcgcgacgattgggacaacctctcagggatcaagattgattttgcagctggcacgattcctacgttggttgcttgtgcagaggtctgtgggcacaacaacgactgcttacagtattcgtttaatcacgccgagggtgtttgtaaacacgcgtctactacctttgcgggtgttgctaccaatggcacgcagtctggttggattacacctcgtgtgaacaaactcctcaaggcattccagtcttcatgcaatgaggtgcaatatgtattggattgatttttctttcgttcctcgggcattttatttttcgttgtctgtacattatcaacttccttttctttccccctcttcctactcgaccatcaattctcacatcagaggacaaggtgatcccatgctttcaaaaaaagtccttggcgaggcgttttgctatggcgctatattggcattgtctgccggtcagatgaagacttatttttggtcgctggaaccgttttccgtttcattctttgttttcattacatacatttactgatcgtttctagtgataccaatttttccatcatatcaaatcaatttaaagactcatttacaggtgcggggttggagatgctgtaatctggatgaaactccgatacaccgtagagtgtccgagttatatgactatcctaagtgataagctatgattcattgaagttggttcactcaacatgtctttgaaatttacggtacttgaagcttacaatgaccatataacagcaccgtccttgataaaagtaaatgatttctcaattcttttctctaaatcttctgagtattttcctgaacttagctaggttatgagattttcagaattattagatccccatggacagtcaagaaatcgtcacggtctttccaccggatgtggtgatttaggcaggcaactgaatgccgtacggtatatcgaggattctaggtaagaaagtacaagatatgtgtataaaacgcagagtgatagtcacctgacatttttgccctatctctctctttgacgtcaaacaaagaagtaaatccaaatgtggcctggcctatttcagcttgagtgaagttcgctgacagattaagagtgtaggttccgataagacctaatcagcactgtagtatgtgttggaatatccaacttcacgccatactgatgatcacgagcaacaggcacaagactcgagttcagtgtctctagttatattgattgaagcatcaatatgtgaattgaagatgcggcagatgcgggtggataattgtgaccagaccaggtggaaggagtcagctgtggttgttttgtttttgtttctcaactttgtgaagccactcaggctgttgtgacaattaccatgaccatgaaaatttttagtggagagatttgcggctgtatgtatggttgtgacccggcaaggattgtggaattgtcgtcaatcaataacttccaaaagaaaaatccaggttgcggatcttggttatcgcagttggtgcagatatgtctgcagttgccagcttctgggggaatgtttgagcatagagagttgaaagtgtggaaagtgaagtgggaggtgggaaaaatgagaagatgggggaaattctgggggatgagtcaagatcgttcatgacagctggcgaaaagctgccgaccgggtctctttgcgaggtcacgcctggttgttggtctgcctcgaagcaacttatagtgagtagcatttaaactaccggccggagtgcttccactgcaagcctgtcgaccagaaccgtttctggctgctgaattgttttgagatgaggtgagggaatgggggataggaaggggagatatgagggttcctagaaacgagtcagtaagttaatctttatacaatgaaggaataaataccataagaaatggttatagggaaacatgtcatggaaggtccatggaggcaggttcataagaagtaggtcttggaggatgtgataaagacgaaggaaggagggatgtgtaggagaaagaaaaaaagaagagacaggaatgggcaaaggggggtatttataccctgtagcttaaggacctagagaaactcgggttggtgacgatatttgactaaaagggaaggacccccagggctgggtcgtgccttccttccatcttcgcgaatcacctgacaccagctctttggaacgcagggaataaaacccataggattatctggagatacacagctatataataactaaagatgaagctattcctggattgcacatagatctatgtaccaatatagacatatagacagggacaggctttgatttgtatcgtatatagttgagccctagtctagatctgaccgatttattcacacagacatactaaggacaccatcataagagcagcttagctcaacgccgctctccggattgtccacacacgaccactgcgtaccggagctcagtaagacatgaccgttctcagcaatcgggcctgagaccctctcaagtcccagtgtaaacagattgaagtcaacggcaccatcggggaagtgtatgtaatattgactgttgttgcatcgggcattttcctttggcgaagatccgtatgacctggcatcaaacggtatcagttagcgtctgccattgtcaatagatcttgatgacaaattagactcaccaaatcaggttgcagtcggttggggtgtcgtcggggtagtttggatcagtcaggctgaaatgcattgtagcagaggagccggcgcttgctctggcccagaagtcactgatctggatagagctgtctcgctcgatgatggggaaggcgatggcgccggcaaccaaaagaggggagacaacagtgatcttcataatgaattgatagaaagatgtctgatatactatgagatatgaatattaaatgaaagagatactgtgggagaacgaattatttatatatctctagatggcctgaagtatacaaatctgaccgaaacactgcagcataaatgaaactaaaccaaacctatgcaagtctatgaaagtcgctggttggtcgaattgtagaccgccaccaccaatactcgtgggtaagcaagacaaatgtaacatgatgcagcattaatacgagcaggtagggccaattagctgtagcttacatgcagtgttatccatatataagtaagaaacaatacacatcaaactggtgtacatatcacatagtatgtacattgtatgtagatagtcgtactagtttcggggtgaactgtacaaagtaataatcataagtttccaaggtaccctcaatgcaataatttccgtagttgtaggccgacatatttttcgcagggtcactggacgattctgtctcaagtaagaaagtctcaagaaacttctaccaaaaatggaacctagatcgaaaaagcaaatacattcaactgtttacagtgtcttatgcccatgcctcgctttaaggcctcccaatatcttggcgacgatcattgctgtctacagattttgtcttaaacccgggggattcatgtcagacaataaagacatggcgaatgatagtgctttgttgaccgaaaatctcttcatattagtgattaagcacggtaaccagaaaacgtgcctttatcaaaggccatattgaatccgtaagggtctataaacttccctgggacacatcagaacacccgtgattcaagcaaagccaataaaagccattcttatagcagaagtttcatcgcgaatgaacctggatgagtatatccatctaatatttcctgcacaaagtgaaaagtgccctctcctggacgatccacttacgccaagtccaaataccaaacaaccctgcagatctctcctacttagagtctgtcttggcttcatttaaccgaagctgcggtcgatcggagaattaattggcagtgggaggaaattctatattgtagtgaacgtgtaaattccgatctactggacaggcggcagcacaatttctagcggtttatatgagatatgtgaatatcttagaattcctattgatgaaagcacgttctccaagaccaaggccaataccaagactttgattacctcggaaattcgcgcgattgccgatgcaatgaggtcaacggttacctcgccgatctggaatcccttcactcacaatccttgccacattccggtatgccatgacagaaatactgccttcgcatggacatgactttgaaagcgtagcttcccacctcaagcagggtacctcatggaagttgagactggcgtccgatattgccgtccttccaaggttagctgaaccactctcggactacgggaggcgcatgggacgaaaccttactgtgacgctaaagaacccaaattcctagctgattggacgatgaggatgcggatttttatcagatgatctgataggaggtgattgattggaatttttggacattgcttggccagctaaaccggaaatttccacgatataatatgctcaactgtcttcctccggtggtgccgaccctttgcatacaacttttcatccgccagcgaattgtgaggacccctcgattgtctattctgttacaatggaaaagacaatcatttccgatcaggtcacaccggccagtactagccatgatgctgagagaatagcggaactcagagtccaccagaacatggatgatttacctgacgacaaggcaagtctttctggtcgagactcgaacgagttccagggtggcgtgcaacgagtaagagcgattacatcggcatggtcgaccaagacgctcattctcatgttcattctgtaagtctggatctcaataaacagaaagtaaactaatatcccgccgaaacacaggctctaccttgtgtctttcgtagatgcactactaagctcagtcgaaaccgcactgaacccctacataacatcctcattccacaaacacggcctcttgacagtcgtcagcgtcgtttcaaccatcctgggcggttcatccaagttaacactagccaagatcatcgacatatggggccgcgtggagggattcctaattatgctagttctcgttacgatcggtctaatcatgaaggctacgtgcaagagtatggaaatgtacaccgcagcacacactctatactgggtaggccacatcggcctgacctacgttgtggaaatcatgctggcggacatgacctcactcaagaaccggatggtcatgatcggcctgaacggtacacccggtatcgctagtacctttgcaggcccggagattgccacactcttctacaccaacctcgacttccattgggcatttggttcgtttgctattatgcaggttggggtttgtatacctgtcgctgcggtgatgctgtttatgcaacgtcgggctgaaaagagcggtactcttgagaagactcgttctggacgttcctggtggcagtcaattgcgcattatctcatcgagtttgatggtacgtatttccatatatgcaggtctttttgaatttgacatgtgactaaagagctgttttacccagttgtcgggatcatcttgatcacagccgcattctctttaatcctgatcccgttcagcatcgcctcctacggccctaaggggtgggcgagcggatacatcatcgcgatggaggtcctcggtgtagcgtgcgtgcccgcattctacatctgggaacgatactgttcaccggtgcaattcctcccgtggaagtatctgaaagaaccaacaatgattggttcgtgcatgctgtacggcgtgatgttcgtctcctgcttgtgagtgccagtctcttccaacgcttagaatcaaaggcacagcctaacgcttgcaaaacagtacatggaacagctacttcggctcatacctacaagtcgtcaacagactcgacatcacaacagccaactacgtgctcaacgctttctctctgacctctttcatcttcagccccatcttcggcctgtaagcacacctcaccaccccacacatacctctgtacaaagtctaacaaactttcttcgcttctcagaataataagctggaccggcgacttcaaatggaccgccatggctggcgtaccaatcttctgcctaggaacagctctgctagtcccgttccgcgcgccagacacacacgtggggctactaacaatgatccaaatcctcgtgggactcggcagctgtctgttcactgtgtgcggacagatagcgataatggcgatggtaacgcaccaagagatcgcagttgtaatggcgatctggggattatttgggtcgattggagcggcggtgggatctgccatcgcaggcgggatgtggaataatatcctcgagaaagagttgtataaccggctgccgcaggagagcaagcacctttcgaagagtatctttgccagtttggtgacgcagatttcgtacgcggatgggacgaaggagcgcgatgctattgttggggcttatgctgatgttcagaggaagatggcgattgttggggtttgttttgtgccgctttgtattctttgtacttggttttggaggaatgtcaatgttaagaagttggaaaaggagcagacggctgggaatgtgtggtagggaagggttcttgggaattggaaatggacagagcttggatggtttgaatagagatagaatagcaaggtacgtggagtatgtacgcaggagtagaaaatatcgacgttatgacttgagcgttgacttgtgatattctggataaaatattttatttgtagtgtggcttcaaccactacacttgtgcagatgcgctggacttcggagtatcctatagcgcgggtgtatgtacatagtttgatggcattcagcctctcgcaaggcggggcgaatgagagtattcttcctgttcgatggtgagagtatgagccgccgagatgaatctcacgggtgatttgatactaaacattggacttgggttgtgatggtggctattatgtggccaaaatatatacccgtggcccatttagattaagacggcaaatttgcctagaagcacggtggcatctatagacagcccaggaggctaggggatggccaagacaatggatgccctttcaagatggggtagaccaaagtaacatggtctctaaaagctagcgagcgaaatcatgccgatatctctcagccggccatagactcctcggggacctcctggaacgtctctgggaagaacccaggtggcggccagatatccgctatagaaggtgggtgcaccagtggttgtgatccgcccaagcgatctgggtcatgacagaaagcctggaacgtgctctcgtccaagaagccgaaatccttcagaccagcctcgcggttcgtggaccattcagtggtatccaggtacgcgaggtctttgaagatagcatcgatgtcgccgacggaagtgacgtttccaggcatcattgggtttgagcttgtcgagtcgggagtttgtggttgtggttgttgctgatgttgcgcgctacctgtgccatacacggaatctgccctgctgcgtggtgtgatcttgtccggtaggactgactgtacttcccttgggtggtgtagtgaaacatccatcatgcctagatccgtgttttccattactgtgtcttttggggtcaaggattgcccgtcgactggcatactgatgccaagaatagaagagttgtaatctccttcgccgttttggggtaggctgcgagctctacctagggattggatggagcctgccatgggtgcacccgaaaatggaaggccgactggccctgggaaattggatggtccgccaatagcatcctttgggtgctgccacctctccatggcggaaaccaaagatccatatgctggccatgtggaggttaaagctgccgttttgtgtcggaactcgtctgcccacctggcaaaggggaaagtgtccgatgagtcggcagtagtccgaagtcttaacgtttgctcggcaattgtgcgaagacttagctcaaacagcggtggacaaccgcaaatagagaagttctccaagtgttgggtgagcatagagagccctcggtagagaagcttcttggccccctctgtggctggacgctgtgaacggtgcaacccttgctcacccggaatcaattgcagatagagccaaagcagggtggcaacataggttagccctaggtaactctgatggggaagcagggctgaatgccgttctggatatatgctttctggtccaatcagacggcatcccagaggtaggcagtcatcccactgcttaagctccatgaccaactgatgcgcaaaggtggccatattgtatcccgaagacatatggcgagagatcttattgagaacgctcgccaactcaaccaagcggttaaagcagctcaaggccaagagtggtccccggcgcggcgggttcttgctcccctgtggagcacccgtgggtggtaaaacgtccacccaggagttccactcctccaatccatcctcttccaaaaggcccaccgtagtaaggtcgcttggaggcatggctgggctccgtgaaaggcggaaagagagcaatgaatcaaccacaaagcatcctaagaagaccgccttaccttgtctaagctcatcagaccgccggctgtcggacacatatccaacacccatggcaaccgccatgcgcacggcttgtccgctcaacagccaagccgcggtccaatcctcgagacccatgttaaccaaggtcagcagcagcaatgcctggatatggccgggttcataacgctctttctccatggggatgagattccgcgagacggcatagtattccttcgccagggcaactgttccagcggggccggcccgtgaatttgttcgcgattgggtgatagtgtaactcatgatagcccacagggcggcatgatcgccagacccaggtgaagctgtggcaatagagaaaggggcattggcataaaggtaggaagcgcgaagaatattatgcttggtcaccacgggaaaccatgaatgcgtgaccgcaaagtaaatatcgagcagctgcgacgtctgaggcggcaactgcagcgtatggggactgggtccagcgacaccccgaccattcgaatcttcggatagtcgagcccgcttgacacccggcgatacggcaaagggctcaactacacgcggggcacccggaccgagcggggtggaagtgcgagctactcgatacccccattgaccgtcggcgtcatcatcttgcggattacgcgatctcttcccagtcgtcggtcccggcgtatcagaattagagagcattttctccagggcgccgaacagccggctcgttttccaagattcgtgtagactttccgaagcactatcatccgaccacacggacatcaatttctcgcgacgaccggcggactcggcagtgtttcctagcatggccagcatggtatcctcgaatccctcaatgttacagatcgacagcgcccacagcttttccaagccacggacgtaaccctcggggagaccgcgtttcttcgcatgggggtcgtaggagcaggactggcccgatacctgacaggcggaacaagtgggacgaatgccgtcacatttatcctagggtcgccgggatgttagactgagcaaatgagatatccgagaaaaggacatggcgggacgcgactcactttcttactgcgacagcgatcgcaagctcgggagaccctcttgcgccgaggggccttatctgatccctcatccatgaagaggggttattagcgcagaggacacgccatgtagagtggaataaagggaacagcgagctctaggtcaattccgagttcactgaatcgcagaataaatttgcaagtaatgccaaggtcggaccgtataagaagcaggccgagactcggaacggggtcgaagatgagtgcaactgcgaatataaagtggaggagcagactctaatcaaaccaccatgtaactatggagtagttagcctccacgacaaaggacacagataggcaggccgagggaggactctcggacgtgaagttcggggtgtgaaggtactcggaattatcgggggatctccaacgaccccacaaatttcccacatactccgaacattgacttgctacatcgtatatagccgatttatagattgagagagcatacctgtaagtagacatgactacaccatttacactgatcagacaaggcaccaaggcaccaaggtatcaaggcatcaaggcaggcattccggatgtacacccgaccaaagccgacgacgcttaacccgattaggactttatatgcggcgtaaagaggctgtagagtgagcattagtttctcaaagatcaacctggagactgggctcaacactaaccctatatcggcatcgatatgcactgtgacttgtgtaagagatcctacgggatcgacattagcgcggttatgttgatgcagtttgatatttcatcgtcaatttctgcctacaacttgcagtatatcgtattgtatgaacggatttcgatataggctgcatttagtcgcttcaagctggctgaattagaagatttcgttggttcttttacagatggaagagaaaacatagcctcctttccagctataagtttacaatttattctctggcacgattctatggttccaattagttttcgaaaggaaaaatgtaagttctttctatcctatgtgactgaacttctttgccactacagactcgggaggagggcgagctcgtataaagtagtataaagctcgctcttatagacttgggaatctataaaccgtacggagcatgcataaaaagattatcgtgccacgaactaggctgtcccaaccccaggccaaggttttattctcaagaactacggattctcgcaccatagcattgggtatggccgacacataccaaccgcccggcatgcaagcttgctttttctacgtgtctccttgctatcatgcattataaaccatgttgcctatggagcagaatactacaaaattcaaccattctaccccaaagaagaaaagccagcgcttccaagtatgatttattggaccagggagatgaactatgaacaaatatgggcataattcccaatttccacaattacaatcctagtacggagtactacgtatgtgtgcctttacgggtcggtccgtttcgtatacgtcgtgtacttctgtcagtgcgatttgagataggcggctacatgagggggaagtcttactctcagtcttactccgttgatctatactccctacgtccatcaacatcacgagcgccggacggagcacgatgtcgcaaaataagcaaaaagtatgccaaattcccagaatcaccacaggaagttactttgggacaaaatgatgccaaagtgtccgcaccgaactaatttagatatgcatcatgtaagaaatcaatcttttagtgatatgtaaattcttttgattatagggactgcaggccgaaggtactggctcccgtctctgcgaaagtacgccgccactactccgtgcatgggggtgctttatttgcaagaatctcaatacacttcattggcgcgatgtatacgctttccgaaagtagtcttcttgatatgtacactgatggtttcgtcttgctctctcaactggggactgtgtgtatcgccgcccctggcacctgctataccatgaacacagaggtaatcatgcgctggcacattgcgcatggtggcttggctggctctcttcgacccgtcgctatttgaattgattagttggtcgtggcaggaatcgtggcattatcacctggaatcaattcagaagccggctgacttgaagcaatggacgaactctatctatcggtacagtcgacaactttaatatatagcaattgagtaaagacatagtccatgatcagtctcagtctatttcttatccttcctcgctaaactgcctctgggccgggctctggcatatcccataatgagcaataagcgtcaggtcttcgtttcgcttcatcatcgcgactctccttctctcggcgggaataggcaacgacttggctatgcagcctaccattgggggattctcatttctcccaaaaattccaaaggactagactgctatgctttcgacgttagcgatggacttatcctcgatcctgtaaataggcttaattgcaatgagagatccaattggcactttcgagagaaagtaaacgttgatccaacccagggtgaccaccttattggaatggttatggttggaaaggtgcctcatgaggctatcgatgcgcaaatctacggtcttcttaaagcaattccacttccccaaaagggttcacggccggagcaaaactgcgttacttggacgaaagccgtaatttacacgctccgagagaatggttttgtggagatattcgatatcgatcggtttatggacaagacgctcgcattcgcggatcaacgcatacaccgcacaaaatctacacccaatagaatcaactacaccagtcggagtatgtgactcgtgaaacgcctcatatggagggaaagctatgacacttactatggaagggtggacggactaagaaagaagaggagagaagaagagtgaggaggggaaacgggaggagagggagaggaagggaacgaatcatgttatatgagtgaaagccttaggcgttcgaataagatctcattgcgagaccgatgctgtcacgcaagccctgaatcagatgctctctccctcgccagaacatttgtggatcatccaatagcctccaaagaactcgttccgcttcaagctcgtcgtcatatctcttctctaaagcatttgccaatccactataccattctggctgagctatcgcgccgtagtttgccttggtatactcccaatattccgggtaccagccgccaaattgccaatcaacgatcgcagagaccttgccattatgcatcataatattccgaggagcgaggtctgcatgggtaaagcaacttcgatagcgacgggagtggcattctgcgatctctgggcctaattcatccagagggatatccgctcgaatgtatgggtggaatgcttcgtggctcacaaatggtccgaaaccccaacttccgactcggtgatcaacgttctcaccgaaatttgtggatgcaactattccttctcgcggaggttccagtttccgaagctggctaacatatcccgcaacctggttggtaatgtacttcttctggtcttgcgatagttcggcgcggttccatgctatatcgagactcgttccacggataaactccatttcaatatagaaccaataatcgtagtagtgggtgttgaatactttagggacaggaattgatgtgtgctgagcgacgtatttcatggcttctagctccgatataggacaaggctctttaatcattctgccagggctgactcggactccacgtggtccaagtttatctgctccaaagattttcttgccaatccatagtcgaagtggaagaagataagaggttgggtgctttttcttattcgccatggctggcttggctcggtagatggtttcccttgtattattgatagggtgaaaagaaagaaatgtgaatcgaagagtcggttgaatccacgtttcactgtagtgcttgggcttataactagtaatttggcccaagctattgtagctcttcattctatatacaatgttagaatggttccaactagtcaatcaggcacactatctcattattacccaaaacagtggaggagtacgctatccaggatatagaatcaatcgtctatgtccttgcaaatacggggggcgatgcggtctgatttgagaataaggtgtggttcaggggtacaggtaggaaggaggcgagcagactgtttacaggtgacaaagggtgggtcacatgactatcaacacgagcatcgagttgggatatcgaaggcgatgtgaaggtccatggagttctaaacatttatttcgtgtgatttcgtgtgatttggagacttcgatattggctatagcactagtataaacatttccccacaaacccacatctaaaagtaaagggatccataaagacttgtagtaactcatggtgagctcttcggaccagcttccagtagatgatcccgcgagagacatagatttgacatgagatgatgtgcagtcaactccactttgagatttgtatcttgcatctctccagaccgagatctggtggaaaagccttttgccggaaccaaattggccggcaacttcctaaattcctcattccggggaacatctaccaacttggaacatcacttggcatattgttcgactaacatacttagatcaagactattccagactgtattgtcctgtctgttgtccacatgagcatcccttctcatcccttctcaacatctcccgcattcgatctccgaatgcgattctatgccttctgatcatggcgctcgttcactcgacatagaccctaattgatctatcgcctctcaccatgctcgattctaaaccctcaatttcccccacggtcgacgccaagtccgacatccccgcatgtgccaccaaggaatcctcctctccaaccatgctccgcccctcgtccgcccctcgaacatttgctcccaatgcatccctcatcctgatcggcatccgcggatgcggcaagcgctcgctaggctttgtcgccgcgaccgcgctgaagcgacgcttcattaccgaagaccactacttccgagaggtcacaggcgtcacgcgacaggaatacctcaagcggtacggcagccaggagttccagcgacgtgacatcgaagtcctgaagatgatgctggataaccaccgcacgggctgcgtcgtggagtgtgggcttgccagtctgacgcgacctgtgcaggatcatctgcgtcgctatgcccggtccaacccagtggtgcatctgctgcgcgatatcgatcgcattcagcaattgctcggtttagaggaccaggcggtacggttgtttcgggagggggacccgatgcatcggatgtgttcgaatttcgaattctataatcttgaagatcgaacgcgtgcgtcggaggatgggagccccgatcgccggtctgcggattattcattcaaactgcaagaagtaaaagaggactttacgcggtttgtgcagtttattactggactcgatgtgaactattcaagctacgattcgccgttcgttctgctggagacgcccccagaactgcgctcctttacccatgctatcttcgtgcgatcttccgatctgatcgccgacaatgtcaacctgactgaacttgaatctggtggagatgccattgagctttgtgtcgatcgatggggcccagacatggcagccactatcagcaaacaggtctctgtcctgcgtcgaaatgcgcggacgcctgtgattctctccgttgacacctcatccatcggcgtccgctccccggagccagccacctcttcttctcgatcttactttgatattctcgcgcacggtctgcgcctgggtgtggaatatcttgttgtagacctaactcaagaccaatcccggctggctgggactatcataggtcgggggaataccaagatcatcggccagcaggtctttgaaccatcttcccccactacatgggacagtgcggactgcgtcgccatctacaacgaagctgaaaagctcggctgccagctcgtccgcctcctccgagttgcaacaaatcgcgaggacaatgccgctgtgactgagttcactaataaaatccgatcgctcccgggagatcacccaccgctcattgcctataacgttggtgccctagggcgcacctcacaagtgttcaactcaatcctcactgcagtaacacacccggcgatcacccagtctgcagattataagcacgacccgcaaataacctctcgcgacgcagtccgcgctctattccaaagttacgtgctcgacccgctcaagttctacatctacggggagaatgtcgcctacagtttatccccggcaatgcacaatgcggcacaccaacactgcggcatgggccacacctacagcatcccagagtcaccctctctcgcggtattagaccgactgggccgtgatccacactttgggggatccagcgtcgtgcagccatggcgcgtacaggtatatcaaaagctcgcctcgaaaagccgacacgccgaagccatcggggcaatcaacacgatcatgccgctccgcggacacgcagacggaacaatgttcccacttcaggaacaagccagccgacgcaaccaagccgggcgcgtgctgggatggtacggtgaaaatactgactgggtcgggataatgacgtgcatacggcgacatctctccccgcgcaacgcgattagcgcaaaaacaacaggcctagtgattggcgcgggtggcatggcgcgggccgccatctatgccatgctccgacttgggtgtcggaagatcttcatatacaaccgcacgcaatcgcgtgccgaggaagtcgcgcgtcatttcaactcctgggcgtcgtcgcaagtcgactcggctgaggtagtttgtgtcttgaagtcgcttcaggaagactggcccgcgggcactgctcagcctagtctcgttgcgtcttgtgtgccggctgatccagaccgagatgaaccaccggcaaactttgagatgccaatgcagtggcttgggagtcctacggggggtgtgattctcgaggtgagcttttttcccccgggatattttgacttcttgtcacacgtactaattgcatatagttggcatataaacccctcgatacgccacttctacgacaaatgcgccgagtccggagcgagaccggacggccttgggtcttgtctgacggattagagaatgttaccgaacagggaattgctcagtttgagttgatgaccggtcgcaaggcacctcggcggcttatgacctatgaggttctacataattatgtgggtgatagtgggcgttttgacgagaagactattcaggctcgtctagatggtgttgggtctccggttactcagaaacaggaatagagtgtattttttatgactgtgatcgtttcttcttgacttctttcgtcagttttgtatatataaaacaatctcaaacagtttatagcagactcgactcgatataatctcaatcgcgtgcgctgataacactctcctatcagcacaccgcccggcccgagccctctttcttttgtttgggtctcgtcagcttcaaactcgactccccctgaggtttctttgtgttcctagccctctacaatatagtcaaattgacttgaatagggtatactaccatcaatgccagggttttcgcccgagcagaccgactcgataacggcaacatggaagaaacgcaagcgggaccatgaggagtcaaggactctagcacgtccgtaagtcttacaatgtatctcagtgaggtgaaaatatagattaacatgcttttcagaacaacatatgccccatcctaccgagttgattggcccgaatacgacggtagctgctcactgcctctatcacgacacccagaaggaacagacatatccttccgaccacgctgtctcccccgcaagcgccgacatatccaaggtccttatatagcactaccgtctcaccagttccagcctcaacaccaactccaacacccacatcaactccaacaccagcaatccccgacccacctctccccaaatgtctacagcaccccaaaccaagacccatactcacccccggtctcccccaaaaccctcgtccccttacactacccaactcaacaatccgcctctccctccgccctgcgcccctgccacatctgccaccgccgcccaacaacccgtcaagtcctcgacgcctatgcagactgtgatctctgccacgagcgcgcatgcttcatctgtctccggcaatgcgacagcacatcctgcggcggaacattcggtctagcagaagatccaggaatacacatgcacatgcgcacaagctcaaccgacgacgtcagctacggtgccagcgaggcgccgaggaggaaaatatgctccggctgtgcagtggaggaagtcaccgagaatggggcggagattgtacgctgtcttgactgcgtgcgtggtgcgggctcgtgggctccggtggctattccgtctgattgggatttggatgacatgcggcatgaggatatgactggatgagggttatatatggagttgatttacttgccttctaccgggggtattgaaagcggatatgacagaatgacagatgaaactatggcttaacattctttacaacctcagggttgttgctgctccttgggggtggctttttttcttcggagtttgatcctgggactggactggctgggattgaggcgggtttgtttttggcatttatattggacaaacagcatggcaaattaatgatttttattgctctatattgtagcaaatagcataatgacatcggcctttatatacccaactctatttattgacagactatacatactactcttggtttacatcgaaaggtagaaaccaagccaaacctaagtaaaaagccaacgcttatattcctgtccaggtaggaggtaactgagcgggcaatgcctcagtcatggcttgtaggcatatttcctgccattagtagtaaggcaagtaggtacttacgatttgtatgtaaaccactaataaaatcaagtcttttttgtcatagcattattaactgctttatcgtcaactactttagcaactactagccggacaattcgggggaaaaatagggtttcggcacatcagccttgtggggtgccctagtccaggtccaggcgtgaactttcgtctttctctcttctcactgcatgattgtctgttctacgattctacagatcggcgactatctggtatttgcatgtttgtaacttgctccttctttctctcattcctcatattattttgaatagaatacactctgcttcctttgcaagatctggcacatcacaacactttcctctcatcttacatctcatagcactatcacttggctggtcacagcattaccctctctactatgatctgcgaccacaccagcactgcatactagcactatttaactagtgctaccgcgaccgcctttaaaatcaaccgcagctatgctattgctacatcctaatcatcctcagcgtcttcactactccatcctcgcccacactacaaccacattcttaccaggatgagctggagcaccgcgcggagggtatggagggtgccgccagcgaaaatatcataagctcttcttcaagctcaaaacctcagtgaggaagctcttgggcaaccacatcgaccgaggtaagctcaagaaagcaaccgacaacctagaggataagagcaagcaatatacgagcgtccggatctcagaaatgagcgtgaagaacgtggagcagtgcctctatcttcaattcgatagccatgatcgggagatgaaggacgtgcagtcgcttccgctccctacctcggtacgcaatttaagacatagagtatcgggggaatctagctaattggatatagtgactacactaggtctcattgagaagacttttggtcaatctagaaccaccgaagctagtgcccggtaggttattgaccctatcattcttaacgcatgcgacagccaccgcagatatcaaaaatgcgcagctattgaatatccaatatgagaggggctatactttcggcccggttacccttgaccgaaagagggtggttctttctggcagaccggactacggtgtctggtatggcgagagcgagtacactggatctatttggcattttttaagaattagtcacaattaaaaggtaagctggttcatatcagccaagtgaatcactctgatatctactagtggtcagaatttgctgttatcgtcgtcggggcgctctcgagaagccgttcggtttgctagtgtggatgctacggaaggcagctgccatctccccaggaaaccttggcggaaacttacagtggagtagggtctgaggagatggataactattgatcttatccctaagtaagatagtattcgaatgagcggtgctaaggggaaggaggagtgttgtactgattcatggcgcagcatggcgttggccgacacctcttcccccttctcacttgagtcagctcttattgcgaggccatcattgctagttgcttaatctctaccttttaagccctctcaagcctctctcatttctccccaccgtcatgtttcgtgcaccttcatactttcttctcaataaagatccccgtaggccttgacaagtgctgcagcacctagggaattttggtgctgagttagggtactgcgccagcataattctctcaagaattgctttaaatggataaaatgggtttggccgcctggcacaattatctaccagcactttatgaatatggtaagggtatagcctgagttaaatctccaatgttcatccacatacaaccctacttcttcccaatctcaatatcaatctcgtccctccatcctccagctacctaccaaacctcatctgcgctccagcaaagtgccaaagaccacgcatatacccctgatactcaaccgcctccccatccccgataattccatgactgcgcccaccggtacaatacatctcggtcaacctcaactgccatggcggatacccatcgagcttaaggaacggaccaaaaacaagcaacagatctggctctggcttgagcaacgtatctggcatcgtgggatccatggacagtggctgcgtagtgatctcgctgatctccgcgtcgaccaactccggtgtgatatcttccggtgaaagcttgccattctggctcatgtccgctagggtcttagttaagtcgacgagggtctcacggccatcggttgaggagaggaggaggattgtcagggtttcgggttgggttgtggtgtcgatgttttttgagatgggtgcgctgcggtgtactgggtggtgaggagcgtagagttggagatttggttggtggctgggggtgccgtagtaggatgcgagtttggtggtgattatttggtggagagccggaatgcaggatttcaggacgccttggtaaaggttagtatcactctatatatcctagaatatagagaggagatcattcataccggacttctcgtatatactgagctggcaaattcccgaacacgaactccaggccgccagttcagcaatctcatccatcaacaccgcgagagcgtcatcttccttccgaagcgtgagaatcgcacttaaatgttgcggcaagcgcttgagattcttcacatctttccggatcagctcgggggtgcggtggtggtgatagacgattgcgaaaatgcggtcgatgacggcatggtacgcctgcaagagacggacgacaataccgaatatgatatgcgtgatggcataggtgaggtagtaggtttgcgatttgaggaatgtgcggacaggcgttttgcgtggtgttttgcggcgttcgctagtcgattgaggtgatggtttctgaccaagctccgtggggtcggggagatagctcttgaggagggattcacgttctgctatgctgagttttgtgccacgggcgcgtagatcgccgcgcaggatctcgcggtctcgttgggagaccattgtcgtggtgggtgaaggagggaagtggagatgtggttgtacgacggaattgttgaacagctggaggttgtgtactaatgatgaaaagttgttattgttatggctgttttcgaagtatgtcaaatgatgtaaagcattctttctatttatattacgatatcgagtccagcttcgaatatctctgcctagtgttcaagtgcacactgtatatagaaatagaatatgtgcgtggcagtaaacctcccggaccagatccgtcatctccctcagctttccccggattccttcctacaattattcccccaacagtttaagggagaggagacaccattgtccagctctgcaggcagctcatgtctgtccactaccaatcatgatggacaatgcatccatcatcacaaactccgcccgcaccatcttcccccaaggccccagtttcaccctcgaagacttctctagccgggacttcattgtcaaggagttcattgaagccctctccgacactgctatatcccaccgtcgctcgctagccggtaccgccgccgccgccgccaaccaacccttcgatcccaaacccctcatccgcgccttcgaaagcgcccaacgtcgcctgagcgagctctccggggacctcgagctccgcgagaatgaactctccgcagccgtccgacgtgcagaagcgcaacacagccagaacctcaacacccttggccagaagcttcggcacaccatcgaaaactttcaacagctcgacacgtctctaaatgctcccggccgcgagcatccagcagggacggggaacatggcagtggagacaggaaagcgcctagaggagctagaccgacagcgacgacgagctctggatgcccatttccttatccaatgctgggacggcgtgtgcaatcggggcgagatctcactattggagggcctgcgacgatctggcacgggagaggcaaaggtgcgctccgcaaacattgcgcgccaactgctgcgcattagtcaacgactagacccgcagagctggcaggaacaccgggctcactcgaatggtgggtacgggaatagctcttcgtctgaggatctcagcgaaagcagcacgccgcggcggaacacgcgggagattattgagaagttctccgagacgctggagaaggacttgctaaagcagtttgacgatttctaccgcaaggctaacttcgacggtatgagggattgtgcgactgtgttgcaggatttcaatggcggcgctagtgttattgccttgtttgtcaaccagcatcagttctttattgagcgcagccagctggtgacggaggaagtcggtggcgatccagagtcgtgggagaaactggctgatccggacgcggagctgcctggtgttgaatccagcctccagtcgttggtcgatgaagtcaaggttgtagtccaggaggagtctgctattattcggcgggccttcccctactacgagcaagttctgggtaagttcttacagcgggtctttcagcaatccatccagcaacggctggaaatggtactggagaaagcggcaggtgtatcgtcactagcattccttcgttgtctacaaagctcccgtggctatattagtgccttgatcgaagatttgaaatcgcacgggttgaccgagcatccggaacctgtttcttcgcagacagctttgttgctggaccagcaactggaggagcttttcgttccttatttcgttggatcgtcttacatcgaacgcgagaagcgaacgttagaagaacttttcaatgcggttttgttcaggttcacctgctaccatgcccgccgcaagaaggcggcaacgactttcatggcctctttatcccgggctggatcagaacttctgtcgactacacgcgatgcatttatcagccggttggattcaccagaggtctcacctatccagcgaaaagttctactcagcatagccaagataggcgatacgctagagacaactcgattgaccgaaatcaagctcacagaagaagatggacaacccaatcttagcgatgctaagcggatgctgaagtggctcgctgaagccgtgggccgaggacttgagctcagtgtcaacagcgacacacccaaagatgtctccgccttgctcaacctgcttctcctcgcgatgggagagggatatgtggatgtctgtctagatgccgccctggaagcggctacgtcgcaggaatccggcaaggccgagcccgacttctcctatctcttctcggctcgcactacgatcagcattactacattgatggtgatgtgcatccatgcggtccttatacctctatcagcctcgagcatcaccactcgccgcgatatggagaagcgcaccagccaaaccacctcgcgcatcgaggacaaaatcaacaccatcgagcagaaaaccattgacgccacattcgcctgggttagtagatcgctatctggccagaagaagaacgacttccgccctagggagagtgataacaccgcatggttagagatgctacaaactccagtacgttccatctaactacccccaaagaaccctactaatcccaacagacctgtgcatcaatcacctcatttttaacccgtttccacaatatcgcgcgcacctcgctcccatccagcggcgccaacgtgcgccaagtgctgaccgagatagcactcggaatccgtaatctcctcctcgaacacttcaaacggttctctgtcagcggacctggcgggctaatggtaaccaaagacatgacgcaatatgctgacctcttcaaatcctgggacattgacgaagagaccaaaggccccggtggcgcgctggacgtgcttctggaagtcggcagtctattcgtgattggcccggaggctcttcgcgaacgaatccgtggtggtgctgccagtggcacgaccggtggccccgggggttcaggacgcaatgctgtccaggagggtaagttgagtgtgcaagaggtgcgggcttatatctcgcgtcgcgaggactccaatacttttgctatgcaacaggttcttaatgcattgtgaggaggagatcttggtctgggatgtttataccctattgtttttgctttgatgggagcgtgttgtttctactgggggatatagaccggcgtaacaataatgcatgcattggtacctgcttgtcttgatatattgctttcgtaatcttgttccatgattgctttaaacaatacgaagataacatctacctagagcttttgtatgtcatgtacgcaccatccaggcatcgatgcgatacgccctgtcatgcgttgcacagcgctttccggaagggcctgtataagaaatccggaacatgccaacccctccgccagaggttataaattctctttcccctcttctcagacttccctgttgtcgctcttctgtcacatcccgacagaactcccaactcagaattctgtcgctagcgggtgtcgccgcatgattcagttcactccactgctggctatctgagtggcctttcatttatgataacagtctcacagtctaacagtctcaactgagcccggcagagctgcacctctcctgtgccgccccgtaatgcaaaagacgggtgttgacatggcatcttgatatcaaccagcccacaacgcaaagtctgctgacggtatcatggtgcagggtgcatctccatcaatcgataatcatttgcatcatgagttcatctatggcaatgcctggagcagctgaatgagcccgacgaagctgaacctcgctaaagtacgtatgatcttgactgacttggtttctctccagtcctcttccaaatgatcgtcgctagtgcgtctccactaaggacaaacagaaaataaaaaaacagaacgcaagccaaagcaagaagcccgagatagaaatgcctagattccaatgactgatcggaaagacgccaagagtgcagagaagggcaaaggccatcttcaacttcgaagtatgcaactttttaatctttacccagtctcgtttgggttgactgctaattcttttgctctaacaggaggaacaaaacgggtctttgtgcccttcctcggttagggctgaatatttcacgacgtcgcgtcgggtaaaaaaggtatgacatcctttatgtacattcagagttccattgctaacatcttcaaggcaggccagtatcaaggattcttcgtataggtctccgcaattcccgactcaggatcctgatcatcaccacccatccctcttatatactccgagttccctctccaaatcccacatatcaaagcccatgcgcagagcgactggtgccacatcagtgatcagagccatcgaaattcttctattcggcatcgcttgctcaccccctgaacaggcaaggaagagatcattgaagtcatggaattggtcaagatctctgggtctccaaatcgtccactataccctactctatgcctgtttcgcggaggacctcatgcatggtctgctggggccacactcaagagggttgagcccggatacctttcatgaaatctcgaaggatgatctatatgttggttatgcttaccactatatatttatcctatacgtaagtcgcaactttgcgcctattgcaacccctcctccctccaccccatcactacatcagtatgaacctgctgaccaatgacacagaatatatatcctggggttgatcacacctcttctcagcgtcacgtcatgtctatcatggctcaatggatgactattggacagtggacgaggaaaaccttcgggttatgagcatgaaagctccaattcttgcttcagaacatgctgatagctgctcatgggaagttgggcggaaagaaatgcaccctccgtccgagcaaccaggatatctcgcagccccatcgtgggtatatgacatggtgaaggcccctcatcctgtgaacgaggtgatccaaaaagatgtgtcggtaaaaccacaacaaacgctaggcgcaatttgagatgacaaacaatccaagcgaacctgtttctgctcacgacaatcttttttgatttgaacaagacggcgaatatactgagctgtgagtattcaaagccaatattctcaagtctagactagactaacacttgtgattcttagattctccctgttcaatcagagaaatcgcttgggaaaggtggaaaggaagaaagacagctcagctgcttagaagtgtggtatagctcaccaggtacaactgcactccatcttcggggctaccaggatgagagcaaaagaaggctacaattaccgcccatcgagcgagaggaccgagatgtcgcttgaggaaaatacgagagaagatggagaacaacctactgaacaaggcacttgaaacagaatgcttgcagggatgaaccgcactaccattacaattatggaagcgtgttcgccgagaaattaatccacatgattgcaggcacagggcacagaagtcgccgtccgcaactcatcgaaaaggagcgaaacggactacaaattcggagacttggaagtagcgtgctccgaagcatcctatacttgcttcgcgacatgctattcgaaaatgtcttgaggaggatgccatgcttacttggcaacatgctgtgtggaatgaggtatccaaaatcattctactgcccgtgatatcctcttctggctagttcatttctctcgtgctggtcatagcggacggttccctcttcaaaaaaatccgtgatgacaccacacggccgtccgcctcagccttgacctgtacctggataatatcgggtcaaggttgaggccggcttttccatagggtacaaatacatcattgtatccatcgagctggatgtatggaaccagataatacaggaggcaatcatcgacaccgcaatagcacgtggtgacataattttcgatccggcatatgagtgaaaaggccaaaagaataccggcaagacagatccggagaaactgggtatcatctgccatctaggtgtattcctagttgctattgccctgtgcttagacgagaaactggatctcgctggtcctgtgtgtttgcttatgctactgtctcacaacttcacatcttgccacgagcaggtagtagtagaacatgtgggtcatctgagaagtttgcagctgaaaaatgatgggcaagctgtccggggtcctggtgttgagccaggttgatttatagtcataggaaaaggactgattggggaacattcacacactgttccggccatgttccttttgcgttttctttgcttctatgtctgctacttctggttttgctttttgcgactatgttgatttccacatagtacacttttcagtggaaaggattgagctctactaattctatagtaaatcttcatgtttgaatagagatagtacctaaggcatagatccaccacatccacactagaaaataagaaaagtaaccatggaacaagcagacagtccggtgaaagctcaaccttggatgtctcaggtacagagctgcaatattatgtacaagccttccgggataagtgggcagatccacgtacaagtttcatcttgccctgaattgaaggtttgatttgtaccatggtactatggctttaatcttactatgttccagttgatcctgtttcttgtaacatggcatgtttctcactacatctccaatggttgatctggatatcaattgtataaggctccttcccaggcaaggtttgtggctgaaaaacccaattggcggcccgaaactttaccggtgaactgcccaattcggaacgttctgactcctgaggttctcaattgtcgactttttcttttttttttgtaccttacatgttatacggagtcgaaattacgacagcggaagaattatctacgtcttcaggtcagtgcccagtttaaaggggctatcaagcctattcggcagtttatctcccggcacagttccccactaagcttacagactcgggtatcatcctaccagagagagacaagcaatggaggtgaaatgcagctagtagctttagttcgcccaggtaggaagaaatatggacgatcatcgcgtcagatctctctggttcgtatgttgcaaggctaaatactcggagtctgctccactgcgcaacttgtccgagtacataaatgaagactgtggaactattgagggcttctcttgggcaagaattgaagtgctctaatattatagttggcttggcattctacgattggagaagcaatagctattctatagacacttgtatggaaaacagggaccacaaaatgattcagttggtccgtggtaggcactcaattcacgacccgcattagtttattcttaaccgtctccatatttatgttcttctggcccggtaggtggatggttcctgcatctctgaagagattttgcagcacatcgcagatacaaaggccacggaaatgatgctacactaccatatcctaatacttgtagtatctcaccctaggttgagaataatgatgttgccataacatcctcattttcttcgctcaaattccagctgtactagtatgccctagcagttctagtctcacaaatggagacgccacccaacctggcccacagtctcaggcaagaaatttactccagggatctttatttgaaaggttatttcgataataaatagaagagatgccctcgaagcccctttcatagcgagaaatccactctttcactggtgacctcgggttgccgtcccttcattctgacttctatacattcatttatgattgcgaattgaatatatacccccaatggctgaagaaagccctagaaaatccatcgtggaagatgtgttcattcccaaagaactacttgcgactgccaaattcaactcgccgtgggaattggctcgatgggaacattctctccccgaaaacagtcgtatatcacttccggagcctcgcaccttttccaaacgtcctctgagtctttcttctctgcgagtagtggcaagaccaaagcctgcaactcggtctcgtggacgcagtgatccttctgcttttcagtgtatgaaattgatatcctatttctatggcaaagacttgtagaaatacatgagagatgatgataatcttatatctcaatactgatcctttctcgttcttcaggtacattcgactactatgaagagtccgccacattcgagcctccctctccgatccccgagaaagaaccaataactccaattcagaatgcattcctcagtccccaatcactcagcaaagtcagctctcagacaatcagcagcgagcagagcagcctgcaagaagtctatgaaaaagccaaattgagaggcgttgctatccaacgaaagcattgggtgcggctattgtttcaatatagcatttatgctttcctcgttctgttcgtctactttatcctcgtcggtatgccactgtggaaaggtgctgtctggtggctgtattattttgtccgaaccaagttcgttatccaaggcggatatgcaattatcattggtctggctgccttgtaagtgttttctcgagtcgccaagtttcttgccctaacaaactagatacgcattctgtcctctgatgatcctcttcgagaaagatcctccagccctagattccgaatccgaatctccagacctggaaagtaatatctccaaggtaaaagcaactgctctcctcattccttgctataaatcagcaacaatcgtcggcgcaacactcgaagccgccttgaaaatcttccccaaagagaacatcttcgtcatagcaaacggcaacgacaaaaaccccctcgataacacagaagaagtctgcaaaccctacggtgtaaaccacctctgggtacctatcggctcaaagatcgtggcgcagttcgtcggcagctacgcagccaaagactttgaaaatgccgtcctaatcgacgacgactgtctccttcccccaaacttcccaatcgccagcgacagactaaaaggcaacgtccgatgcattggatacacaattaaaagtgtcggccccaattcttcaaagggaacgttttgccaacaagcccaagacctcgagtacaaaatgtccggtctccaacgtgctttcttcgggaaattcggaagtgctacattcccacacggagccatctcgctctggaatatcgagttcttaaaacagaccttccatgaacatcccggcttctccgtgtcggaggattggttcttcggtgatgcgtgccggcgtctgggtggacgtattacgatgtgctcgcaggtcttcgtcgaaacagagacgccggcttcggtgttctggagtggttctggtggtagtcgtggtggattcggcgagatgactatcttccaacagcggtttaagcgttggaatttcttcttcgttgttggcgtgtactatgatttgaaatatatcttgactagctggaacctgggttggtgggagtttggtgcaaagttgtgcgtttttcaagaggtatgacaggcacatccatccatctaggatataagctaaccatgacaggtctatgaaaccctcatctacctctttgcccccttcatcctcccaatctcatttatagtccgtccctcattctgcggaatgctactgggtattacggtcgcgatgtacatcctcaacgtcataatcttcaacgagattcacctccgactaaagaaggagcgcattgactggaacgtcttgttgttctactatacgttctacaagatcgcgttgacggtggtcaacgtgttcagctgctactggtcactgtacaagtacgcgcggtactttgcgcagcggcatccgaaggtcattgaggaccgggatgcggtcgaggtgttacttagccttgagaaggattcgggttcgaggatttcggttgaggatgatgttattccagttgatggtgtgctagggaggggtgttgcgaggaagttgacgataacgaaggttcaggctggaaagaggaggatgacggtgggatctgagaagggtggatggatttgaatatataaagcgagtatattatagactgtacatttacagagtagtgcatatgcacctggattgcaaacgatcatggtgggactcttcattctgtactagtaatcctcgtttgatagagtcgggactgtctcacatcttaagtgtccagcccaggagaaatgccaatgtccaggtcttctacacaagtcttttgtggtattatctagttcaacctagctaccattgcttacttgacaggggtctgagtcctggaatcgatagtatcgccaccgtggacagcatcaccaaaacgggcacttgcatcagatgcctcgtatcttttcttgaagctaggaagaaacacaccctaccgtaccagcggtgaatgtttcactcgtttgcttccacaaatagtaaaatacaacttgcagatgatagatcatgtgtaaaagcccgacttcgcacgcctcgacgtgccacgacgtgccacgagtccggaaggagaccccctcgtttgtctcctgcaattggagttatatgcattagcccgaagcaaggagaataaatttggattgctctagagccaggaaacgttcaagggatttgaagcgattgctaagggatacgccacgttccgtacttgagcagaagaaggggtttattatattgtcaacactgtcgattctacacgtcatgtagaaggctagactacctatgttttattaagttccagcctaaaatagtagtctggatcacttgcatgcaagtgctattgtacttcggaataatagccgatcatctgggatatgttgtacatatttgtacattgttacctttcaactaaatctaacaaaagcaaatcattggctcctggtaatctccgaattaccgtctggactatgaaggtaatttaatttggctgagtttggtatagatcactctgatttagaattatatgagctgtcaggtacgcagtagtgtaacggtcttcgaagaaccggtttggttcttttggctgtttagtactaagttagtgtcaggttagttagtgttgactttctttgtcctagtggacacccctgccatgaactgttgttctcattggacattgaaaattcgatacatcacttccccccaagggatgtcgttctcgtattgtctgtttcccgaccgttaactccgcgacaatccgatagtaccaaatattgaggaaatagagaccgggaacagggaaaaggcacaaagacctcgtcgtttccaattttcaagttgaaagtttccccagtcccgatctaggataggtgtgtttcagacagaaaatcagcgatctaagtggagccgagattgatctccttactgggccacgtcaaagcgcgtagtgacttggagcgcgtagtgacttggcttcggtgagcttggtgacttggatgggattgaggatgaatgggctcatatggcttgaaggaatatcgatcgatcccgagttcgtttgacaggttcgtaggaagtaatacagcggttcgtgatagatcagatagaggggcatggaaggatcgagaggtgagatctgggaatagaagtatcacaatcacaatcacaggcagagggcgctaatgtacagcatcctgtcacagatcaaagagtttaaagatattcggtattcttgtgtatatatacagagggatgtctccttttactttttactttctattttgattgttctattgaattgttgcacacggactctataggagtatactatatccttggtatacttatacctggactgccctcgtcctttctattaccccaatcctgtcaatttctccatactcctgtacaatgtcggaggactttgagtcgctgcctccagcagtacgaagaaaggtaagggtccattgttgtcctccctcacacagcactccttcgcgtctcaccgtcacacgctcggacttctcatttccctccccaatagctcccctccacaggagatcggcctgacccaatcaggcccgctttctccatatttcccttttctttgtctgtccttgctctgtgattgattgcgattgactgtgatttacccctgaatcccctcagtggaagctggcaatccacactatcgtccatggcgccactcgttgtctcgtaacattggccatcatggactaaaattggccaatgccagccaatgccaccgcatgggataccgttggctccgccccatcccccgtattgcctatccattgttgtccagtgtccacagctaactcgaacagttcttctcgaacgtcgagcgtttacgtattcggctagcccagagcgatcacggttcccctgcctactccacatcaaactatcagacggataatcgggtctatcgagcccctcgtcttgggtcggaccatcactcgcgtggtttgcggaacggatctaggaagcgagggctcgagaagcgtccttcttcttccaagaaattacacaaacccggatctcttcaattggcgtatttggccgcccaggcggactctcaatgctttcatgccctgcccgccaagatccaacaaaagcttttctcccccgaagaacgtagacggttaaggaacgcttaccgacaaagtctcatctacgacgccgccgacgaagcttaccgccgagattctggtcgagattctggtcgagattctagacaatctcgcgcttccaccgacactcactcctcccaggcaaccgtgcctgttgttcagtcatcgaccgccttctattcggattccgagtcggatgacgaagacccaaacatggatcaaacattccatgatagtttccgctggctcgacgaggatggcgatcttgacttatctctcgatgaataccatgctcatgtggcagatgctgccatgagaaagagaatccgtccctccttccgccgctccttatccttttccaaccatcttcgcaaaacattagaaatcacaactatctcggctcggggactcccgcctgtcagccagtcccagccgttaacacccctctccgaccgaagccccgaatcgcctccgtcatccagctcgagcatcgacccctgtgcccaatactatcaagaccccgatgcccgcttgaaattgcgcgtatacctggcatcgccacaaaagtttgacgaagccattgaattcggattcccctctctggatcaaaataataaggagaatgtctccccggaaccaatcacaccgaaatctatctccccgagacccaccctagtcaattcagattttggcacattcttcgaagacgacgatggcaccatggtggggagcccaggatcggtagaaaaagaaccaatcccttcgcccgtgctcaaacagtgggacgcgtcccgaccctccgaatcatcagttctcttgcagcgacgccagtcgtcctggctgcccgggaccaaggcagtcccacaacggcttccgggaaaccgtgagatgactctcaaaatgaccctcactcggccagaccttcgcacctactctcccagccccccgacttcttccacaggaaaagaagaccccttgcgattggctgaacttccgccagcggatcgcagccagtccatatgggactcggaccttgacgagcaaggtatggtgaagaagatgtggcgcaagctccgacgccgagtttgacttggctaaatgtcccgatcgatttcgattgccttccactcgttttatttttaatattccttgattgttctcaacactaagatgttgtttcttcttcttcgtttggcgtgaactcattttcgttctataccattctggactttttttttcaggatatctgattctcgcgtcttgagcgaagttttctttctccacggtgtcctcgacattttcatgtatctatttagcagtgttctgtacatataaccaagctgctttatgtcaattgattcaacataccatcttttccccgttcaccaccttcagggggtttgtagaccaacagactagtcccaattgtatgctctcatccacggttggctgccactagacgtgtttatgggccacggttcagtcgatagggccgataagcacttcacgtgacagcaagcttcatcctaaggccgcagaggccacgcagctccgtcatcatcactatcttaactcacgacttttctacttgcctgtgcatttctcgctgggctctaacaacactctctttttcagcgacttcacattccctcccttaatcgattgaccccgtattcccggtccggtccgctccagctcccaccgcacaccccatcagatgcctaggcagcaccggtcatgatcccacggtggctgctgctcatactgagcctgctgctggtatggacgtcacagccagcagcggcaaagggaaatgaaccgaacgttgtgacccatgaactcaatgctccgcccgccgaccttttctactttcacggcacaaacaccatcctctaccgtgacaagaataccctcaccgcgcatgtctccttcgatggcggagagaaatgggagatcgttaaaggcaaggatggaaccatagagggcgccgtcgagttgatttggagacatccgttcgacgtcaaccgcgcgtacatccttggcgagagtggcaagcactggatcacgaccgaccaggccaagtcgtggaaatccttccaggtggacgtactgccattcgcatcgatgcgctcattcccattggagttcaatggctgggacccgaaaaaagttatattcatgggtctggactgcactatccttggctgcatgccccaggcgttttataccgtcgacgacttcgaaaatgtccaaccgttgcgcgagatgacgctgcagtgtatgtgggctgcgagccgcccgcagttcgcgttggacctagacatgccgaaatcgataggagaccggattctctgcgtggtccctgggttgaaggggccttttgagcatacccgtacagaacgcttgatatattccgataaatttttcaaagacgatgcggatggcaccgagtccaaattggaccacggtaaaccgatgagcggtatcagtcttcaaatccgctccgtgtctaagtatatcgtggcgcgccttcaatcacgcggcacccaggagcaggctttatacgtcagtgacgactcgaatgtgtggcaccgcgcggaatttggcaagcgccgcattgaagaggatgcctatactatcttggaaagcaccaactacagcatccagatcgacgtgcaaactacctggcatgataaccggatgggaagtcttttcacgtccaactccaatggcacctactttacgaagaacatcgagcacacgaacgaggacctgaatggcttggtcgattttgagaaagtcacgggtatccagggtatcacgatcgtcaacacggtcaagaactgggaggaagctgagaattctgatgcaatcaaaaagaagcttatcagcagtattagttttgacgatggaaggacattccagcctctcaaggctgataaagacgagctacacctccattccatgaccacctacgccgctctacacgagatgcccttcccagatcaccggatgttctcaagccccgctccgggcttgaccatgggcgttggtaacactggaggtcatcttgaagactactcggatggtgatctttacgtttcagacaacgcgggtcttacctggcgtcgcgcgctcaagggcccgcaccggtacgagtttggcgaccagggaggtgtgattgcggccgtcttagatggcagcaagacggataaggtccaattttctatcgaccacgggaaagagtgggagtcgattgatctgaagcagaagatcaggcctctgttcctgatctcaacgccggattcgaccagcctcaagttcctgcttgttggcatctccgatgatgacaccaaggtcctcatgttcttcatagacttcgatggcctccacgagcgccagtgtggcaccgatgacctcgaagagtggactgcccgtttagatgaaaagggcgagccggattgtctgatgggtcagaagcagttcttctaccgccgcaaggcaaacgcggattgcttcatcaagaaggagtttgccattagcggccctgaattcaaaccctgcaagtgttccgctgaagactttgaatgcgactacaactttgttcgcagcgaggaccgcaaggagtgtctaccagctgtcccgctgacacccccggctggcaagtgcactgagcccagcgataagtacatggggccctctggatggagactcatccccggtaactcatgtatccgcgaaggcggcgagaatctcgaccgccagattgagcgctcctgctcgaatgtcacggggcctgctcccattaccgatggcaaacctcgcgcagaaaagccacagatcatctctgccaaagatacaaactacttctatctcgaacgacaggccagtaacaatggcgttgatgagactatcatgatgctcacagacaaatatgagctgcatatctcgcgtgaccatggccggaactggaagcaggtccacgcggatgagaagtttacggaaatggtcccgcatccttacttcagtgatgcagctttcttcctcaccaacagcaagaaggtgtactacactatcaatcatggcgattctttccacttcttcgaagctcctagtgtgccgaccaaggagaacatccgcgcactcgctttccatgagaagttccaggactcccttatctggattggtcacaaggactgtgaggggaagaactgtcgctcacaggcgtacgtcaccgacaagcgaggcgctagttgggacccgatgcttattggagtcgccgacggcggttgcaactttggatatcacgagggccgcaacaacagtgaaaaactggtgatttgcgagcagtataaagatgaggaaaagaacaataaccgacagctggttatcagtgatgactatttctctactatggacgtcaagtttgagaacatcgcccgttctgctaccaagaacgggttcgtcgtcgtcgcctggtacgaaggagaccagaaggaatacctgaatgccagcgtcagcgtcgacggtcgcacttacgcgaatgtgcacttccctttcaacatcaaggttcctcagtataccgtcctgcctagctctccgcacgcattgttccttcttgtgatggttaacgggggcgatgaacgcagcttcggctctttggtcaagagtaacagtaacggcacctactttgtccagagtctcgaggggctcaacgttaacgaccgcggctacacggactacgatgagttgcaaggcctcgagggcgtggccattgccaatgtggtttcaaatcgggaagaagtgctgagcaagggtgccgccaagaagctacgcactatgattacccacaacgacggtggtcagtggatgcttctggctcccccgagtcaagatgtcgatggcaagaaattcggctgctccgttacggagggcaagggcactgagaaatgcgctctccatttccacggctacacggaacgccgcgattatcgcgacaccctctactcgggctccgccatcggcctgatgctcgcgctcggaaacgtcggtgaacatctcactagcgcagctgaagccgacacatacctcaccagggacggcggcatctcctggacgcaagtcaagaagggacaatatatgtgggaattcggcgcagcaggctcggtaatcgtgctcgtcagcgaccggaaggccaccaaggtcgtacactacacgctcgacgagggcgcgagctggcacgagttccagtttgccgaaaaagaactggtcattgacgatatatccaccgtgccatcagacacatcgaaaaacttcctgctctggggcatggacgagggcaagcgtgtcaccatcacgcttgacttcagcggtatctggagccgcgactgtaacgacgatgagaaagattactataactgggcccccagtcatcccttccaggaagaaaattgtctcttcggccatgtcgaggagtaccaccgcaagagacctactgctgagtgctggaattcctggcgtgagccacatctccacagcatcggccggaactgcacgtgcacccgggctgatttcgaatggtaagcaaaaacacacaatcaccccctcatccaatctaaataccaactaacatgaaacagtgactacaactacgaaatccaatccgacggcagctgcggcctcgtcccaggtctccaaccccaagaccacatcgcacaatgcgcccaagatcccgaaaaggttgaatactgggaacccaccggctaccgtcggattccgcagacaacctgcgaaggcggcctcctactagaccaggacgtgtcaaaaccgtgcccatccaaagaaaaagagtaccaaaagaagcacggcatcagcggaacaggtctattcttcgcgatcgtgacacccatcgtcgccgccgtcgccgtaggctggtacgtgtacacgcactgggacggcaaattcggccagatccggctgggcgataccggcgtcgcatcgcatagctggttatccagggactcggtgctggtcgtggtacctgtggcgattatcgcgggtattgttgcagttgcgcagtctttgccgttacttgttaagagtctggcgcggagcgcgtctggtctgtttggcaggcgtggggcgcagagaccttatgctacgcgtgggtcgtttgcggcgaggagaggggattattcttctgttgttgatgatgaggatgagctgcttggggctgatgattttgacgatgaggaggagcaggcttagactttgacttgagcttaaatttgggcttggattatgagtttgagtatggaattttgatatagctgccttttttgtggtttccgattggaaatgatctttttggggttttgactcttgcgacattatgagcgtgccatgaacctttttgctttctttcttcttcttcttcttcttctttttcttcttgttggtttcggattcggttttcatacgctgtggttgtggcccttggcttttatatacagaaggctctctaggcccgtgggctgtatatcccccattgaacaaaccaaaattcagatttttactagatttcttgaacagaaaccggtaaatggatttaatttcaatggatattagactccgatccaactcctcgccctcttttctgtctctgatatccataaacacatccctatctctatttaagatggtcgggtccgaatgagtcgggcagcaactgggttcattagtacagagaatggaagatgtataaaacagatatatctaaaaaagagaaaagaaactcacctcctccatagtcataactttgtaatttccctcaccgtcgtacatgtatactgggaaagaaggcgaagtaaactcgcgaatactgtatcccaatgagctaggcaaaaaaaaaaggaaaaaaagaggaggaagaaggagactcacaactgcctacacatcccacaaggcgaagcagcaggtttgatatccgtcgcgacagccagagccttgaattccttatggccggcaacctgtgggagttagcaaagatccagacttgggccggttcatataacaaagacagtgataacaaccgaagtagaccaggggaagataacatagaacatacaacagcagtgccaaaagccacgcgctcagcgcatgttccgactggataggcggcattttcgacgttagcgccggcgatgaactcgcccgatgtcgtgaggatgcatgctccgacacggaacttggaatatgggcctgggaaggtgttagttcggtgttgtttgtacttaaaactggatatcgggtgcttatgctgcttcaaagggaaggagggaaagggtcatacagtaggcagttgctttggcgtcaatggccttggtggacagagctgtcagctcctgggttgtgagtgtttgagccattctagttaatgtcaaatagagaggtgttcaaggaagaggggagatgagggggattttatccgctgataggcgataggcgattttccaaggttatgcaacgttgaaggaggagatatggaggtgattggttgttttcagatggttacaatgtacaagatatgagcattcatttctgatgtcaagtgagatgggttcgaatattgctctgatatagaacagttagccctaaatggtatgttgtatgtgctacagtaagaaagttagagaataccacaccgtatcaatacttcagatactacttgatctagcagactagatacacctcatgtcagaattaagcatacattcaacagatattccaattattctacggagatagagtatcttcagatatgggacgttgaatgcccctggacatatggataatgactaagcattgtttccctcctaccccccccccgcttatacgaacatacgatgctctgagctgtaaacagctctagagacaagtcttgtcatcccccaaacatgcccgtaccctttaatctaggcgtccaagtcatcaacggcaaaaagacctttataccactaggtaagctcattcccctgaccagaccaccagtctcacctcaccaatctcaccagtgcaacagagaacaatccagaggtccacgcgcatctatgtaagaaccttggagtatccccgagcctcaccttccatgacgtcctctccaccaccccagaaatgctctcctggatcccacggcccgtgaacgccctcatcctcctctgcgacagacccatctacctcgctgtacggtctcacgtcgaacacagcatacccgagtatctcggcagcggagtcgacgagcccgtgctatggatgaagcagacgatcggacacgcgtgtggattgatggctttgctacacgtggtggtcaatttggagaacgggaaatatgttctggccggatcagagctggagaagatggtaaagcgggcagtcagcctagggccggcggagagggcgcggctcttgtacgattcgcggtttctggaagaagcgcatctggatgcggcgtcggaagggtgctcgattgtgcctttgccgcaggaggaatgcggctttcatttcattgcttttgttaagaaagatggaaaggtttgggaattgaatggaggcatgaatggtcccctattgcgaggtgaattggagggggacttgttggacgacgaagggctggatctgacggtaagggagtttttacatgctgccgacacggaagttcatagggggatgagtattattgcagtgaataatactatgtaacttctgtctttgtgacttctgtctctgtctctatgtctttatgtcttatgccttatgtcttatatcctatacgacttatcatgatattaccatctatcgatgtgacgtcattcatctaaaatccggggtggcctccaaggtttataaaccttggaatcctacttatcattgttgagttgtgcttattcttagcacctacagtttatcatttatactaccctcgaaaagactcgaaaactaactgcaatgaccacaatcctcgtcaccggcgccacaggcaaacagggaggctctgtcatcaacaacctcctagagaaaagtgcccctttcaagatcctcgccgtgacccgtgatgtcaattctgcttcatcgaagaaactcgcccagaagtcttctagtatcacattgatccaaggcaacctcgatgacccggctgccatctttgaggatgtagcgcttcaaacctcggagccagtctggggcgtgttcagcgtccaagtaaatccctgaaacacaatacctcagatataccccgacttaccaataaaataggctgtcaatcccggaaacaccgacgaaagacgccaaggaatggctctcatagacgaatccatcaaacaaggcgtcaagtacttcgtatacagctctgtcgaccgcggtggcgagaaatcagacaaaaacccaacttcagtcccgcatttcattttcaaacacgagatcgagaagcatctcaaggagaaagcaaacgggaccgacatggaatggacaattctccgtccggttgctttcttcgataacctcacgccagattacttcgggaaggtgtttgcaaccgcatggcggatgtatctgaagggcaagccgctgcaggtgatcgcgacgagcgacattggattctttgctgcggcagcattcatgaaccctgaagcttggaagaatcatgccgagtcgcttgctggcgatgaattgacgtttgatcagatgtcggagattttcaagaccttgactggcaataacgtaccgaccacttttgagatgccggtttggttgatgctgtctattgtcagggagatgggtgccatgttcaaatggttccatgatgagggcttcggtgcggatattccggccttgaaaaagttgcaccctggtttgaagacttttggggattggttgaaggaggatagcaaattcgagacacattagtgttggttgttcttgtttggatttcagaggactagttattatgcgaaagaggcctttcgcctcctaccttcgcttgagattggctttgtttgttctggattatatgacaatggtaactgagaaactgagtcaccctgggtgttaaagttggaatgaatttatttgcaatgtttcaattctattctatacaaaaaaataacaagccaagatggcagaaaagctcagattaaataccgttcaccagattcaaatgccgagtagcgagcgagtgagatatccaccagggagtgccatagatgggccatcatcggctagactggagatgcttggcctgacatacatcaagccaggcaagtcttttaggcacaattcgatgcttcacaaatcgagcggaaagcgttaaacaacgcttgattttcaaaagaaacagtaggttaggcatcgagaaggagaagtaaaagtgaaagaaagtgtagaagcaagaatcgtgtttgaatgtatcggggtatagcgcacgatgccaaaatccaaagagttaggtattgaagaattcaaaggaaaaatggggccagcatagtcatcgtccaacctcagttagaccgatagaatagtgacaaatttctatatgcaggggaattgtagcagtctctctgctctctttttttcatccaaaatattgccgtagtccttcataaacagtgaaaataaacgccgagctgggtgctgagcgcgcacaggtgatcccgcacccgcggtacatgcccttgagcccttgctgcctccatagagccttggcctcgccccagaatgaatgtttttgagcatggactggaagtcgtgagacgtctacagtctgcatgcgggactttattgtatcggccgggtagaatagaaagttgtagctcattccagatgttgctcctgcgatcatttgttggtagacggggagcgagtcggaggtcatgtgcgggttcgacttgttatacttgcggaagagcgacgatacgccctcgtatccaccgaaccacgctgcgcttccgccggtttcccggattaaggttcccagttggccccgccagaatcctgccagcccttggtgtcggaagatgcttgcgatgatggccacggggccagcgggtttgaggcctgctgattctgcggggacctgcatcctgcatttcaccagttcaatgggtgtgagtaccagcgaggtgactgagccagatagggctccgctagcaatgagagcggggattggtaggtgctcaacgcctgggtagaccgttgcgcgcagggtatcctggatgagacgatagctgaagaagagacagctggtctccaccgcagctccggccatgggggcactaatgcctctatatagtccccggaagccatcggctcggatagactggcggaaacaatccagtggtcctgcatatcggagaggaaggtgttcggcttgtgactgtagtcggaccttgacggtgtcgaaggggtactcgatgagtttgcctgccattcctgccgacttcggagagtgtcagtctagatcgcccacattcatgtgccaaggacttccttaccgatccaaatataatatcctttatcgcctcaaggccctgattaggcggaagcgatggcagctccatcggttcactgatggtgatcgcatgctccgtcgccgccatcaagtaagatcgggaaaaaagacaaggtaaaagagtgttatcgagggatcatggtaagatgggggaccagaggtataagtagtgaaggaaatggtagtggggggaggggcggtgtaacgagggatttgatgggcttatgaggtgccaagacaccgtgcagaagctaataaggagaaatgaaacgaggacagccctaaacgagcaagaagatggacactgaatgatatagaacagcctgtaagaggaagtcaaacgtggaaagtggacaaaaggtggagtcaggaaaattgggccgaagcaatttctctctttagcggacgccaagacattttatcagatcgagataatcaatgaaaaaactcggtctccgttttgtctcgacgtctcttttgcttcaagtttcttccccccccaatccactttcttgaaacctccacgtggaactggtctttttccaagtcacatattctatcatgtctacctcaacggctacgacatcagttgcgcctccgtctgccggcgtacggaaaaatggtaagtgaaaagaaaaaaaaaaaaataatacgcagtccccacttccctgctctccctcatttccccggctaaccccatcggactttcaggcaaaaactggcatgacaccaagaaggcttttcgtcctactgcgggtttgacctcgtacgctaagcgtcaagagctcaagaagcacaacgatgctgtcaaggaacttgaacgtgagatgaaggaggagcatgaggctgaacgaaaggtatgttgatcttatttcttttctctcttcatctgtctcacttccctttccttttgtatctttgtctggtctctatttcccgtcagcctgtctccataatcatgcgacaacatttcccaagatggtatcactgaccgaagaacccctgtaggcccgtatccagcgcatcaaggaccgccgagaagccaaggaggagaagctacgttacgagaaaatggccgagaagatgcaccacaagagactcgaccgtctcaagcgcagagagaagcgcaacaagctgctcagctcttaaggccattcacggtcttctctatatctccgccataccatctctccatctcctccaggactgcattgtgtgtatatacatcggcttgttgaggcttcttccttcttccctgtccctggcgggaaagtctgggcactcattctggcgtgggcttaaaaggcgttttttctgaggttaggtcataggtcactactagcgagcaagacgaatgtttttctataatcgcaatatattcggtaacgtaattgttgtgtccagtaatataggtagtaggatggactatactgtcagctgcagagtcgctgatcagtcttcagccttggcgtcatcgatcttcccaactccacactccaacccaaacaccaagcctccaagcttccccaagctttcttctcagaatgtaccaccatggagccttcatataaaaaggcatcattctcaaaatcccgaacagcctccgccacattcccacccacccaaacctccaaccggggcccgagccagaaccagcaagccagcgacctccaggccaaatcagatgacttctccagattcagtagccaaggaagtcgccaaacagaccgaaaaaagtctcatcgctcgcaccgccatggctccgatgaccgccaaatctccccaaaaggagagcatcgaactggctcatcccctcagcaacaagagccatccaccttcgatggcttgaggtccagccgcaacaaatatcacaagtcgcgggagtcgcgcttccctaatcccatgatccacctggcttcctccgcgagcgcgaggggattgctccatacttggtcgggcgggaaggataaggatcgcgagggcgatgatgggttgttgaggccggttacgagggagacgacccggagtcgatggggatctgagtcgactactggtatgtcagatggtcggaaggggagtctgctcgatacacctggacagcatgagcaattaatgcctttccgccggcacgagattctgtctatggatgacctggagaaggttaagaagcggagaaagctaggcgaggagtatgtgtttttctggcttctttgcgcataggaaatcgactaatggttgttccaaggtatctacggtctgcattgacttcaattgggacgttagcgacagacgtcacccgtcggctagactacacctattacaatctgcttgagaaaatcacagcgctcaactcgactatctcgtcgttccaggaactctccgactcagcatcaacattcctcagtgacttcgaacgtgaaacagtcgaattagaccaggatatccgcaaacagctcaatgacctaaaaggcttcgagccacaggtccgcaaggctgacgcgttagagcaacgcatgaaagtaggccgacagcgcgtcgaagaactaggcaaacgactcgagaccgtacgacacgagatcgatagctgggaacagcgagaaacagaatggcaaacccggactagccgtcgactacgtatcttctggggcattgttacaagtgcgctgttggtgcttgtccttgctctggtcctccagaactggccacaattctggtcttcccacggtgaggcgtcacgtttgacaacgtcaaaccactctttgccctctgtgccacctcagtccgaggtgtgggatcacgttttcggtctcggggaaagaggtttagagtctgatgcagggcttgctcgatatccgtccaaccttgcaaatcgtcgcgagagcctggacaaggctggtccgacttcgacgatccgatcagggcatgatgcagcagctgcggaacgcgatgctatgagtgcgctggatgaattatgaaaaatttttcgctccagatccttgactagatcaattccctgatctgtgcttccgcaggtttctggtttctggtttgtgcttgaattatcttcaatttgtacttttattttatgtttatgtcatgatacccagtccgcaaaggattcgtgttcgtcattataccgggccctcgctcttcttcttcttcttgtcttcaatcagttcgatattagacgcggggattttcttgccgtggacctcgaggagccaatcatgcaggtcatcactgacatcaccctggacggtgatctcctcaacgcccgcaggcgagcgggtcacagaggaacccgtagcaaatttcttgcccaggtcctttgcgatcttcttgttctccaatccgaagacctccaggccgatcacgaccgtcacgtacttgcgcttgttccgctcgacacgtttgatctgaatcttggaagcggccttgcgctcgctatcgcgtgcctcgctggcggcagctttggcctctttcttagcggcgtctttagcggcgcgttcttgtgccgagacggatagggtggagaggttggcattcagggcatctgatagaaagaaacccagtgttaggatgtcggtgtttccctttccgggcttgcggatcgcccgatgcaggtaaagccagtcaagtagcgtgggagcttcgtaccttcagagtatagtttgtcccatagatccgactcgttatctttgagccattcttcgcatttcttagcggtacctccaaactcgcagtactagacaaaagccccgcacgtcagaaacatgtcagatctccaatgagagtatagttcaaaaggcaatgcacgcaggctcggtgggcgcttttcagtggctgggagttatgccacgcacgacgcagccggggtccccagataagagctaagagccagggtccagagcggggaaaaggctgagttttcacttctgggtgactggaaattgggggattttgggaggaactcaaatgtcatacctcggggggtaatgtgcagactatgatcgattccgtcagcgctatattctcaaacgaattggggttgtgttttgcgccacgggggtcctcacctccacagtacacaacatgtctagcctgtacaactggggctgtttctacctcagccatgatgtatgaaaatagtaccgtgggtaaatggtagctatcggcctagacttcttctctgccagaatcaacatagcgggggcggaggggcagttctgccagctacacccggtttggatatcacgtgcaatgacggtcattgattgtcttccttctaccctgctttagtggcagactagtcaatgtggtaatatggtggtgcttaattgctcattattgggccatcttacatgctcagctagaatggttttttttatcttacaccaaatccggattgggacaaacgtcgctcatcagcacgacattacgtatctttgctaatctccccctcggcagctgtctccaggatggggccacatcccttatcccccggttaaccgaaaccggaaaataggcgatgcaggaagaacaactcgataggagccgtttaaggtgcagctgtggttaccaccacgatagcaggccaggcgcgccaattggtgcccccggtttacggtagatccgcaaatggctgataaggatagtcgattgcaatcttgcaactcctgttttgtcttgcatttcatccattcaattgggcagtcaaaaccggtctccgtcagctagctccgttatcaagagacttggaagcgaagctagtggcgaagacaggaaagagtggttacgttacccctgtggatgttagtgctggcgagatgcgtcgagtcaatgcagagaaagtagcattgactctgatactgtcggagccaatgatcggcgtggaatatgacaaacgttaggaggcccgtggggagaccggggtgcgcatcgcactagcgctacagatcaagcctccgcggagaggtggaggtttcgcgaggtgtccagactgggaaacttacgacgttatagcgatcgtttcagttttccatttccaggttcaaacacgaatacaccacggtagcatgcagcaatagacgattatcactggcttgcgatttgcatcaaccatgtcgcctcctgagaattgatgtcgatggctctagccctccaatcatgacggtgctcggtgtatggttgcccagatactctcgatgcaagcgcacagacaaaggcaattctgtgtacgacacctcttttttctctttttttttggtcctttggcatgtttggcgttgtttagctcttatcttgcatattctcgagctgcccgtgcatgggtacaggattaggaaggagttaagttgggactcgcaaattcgagcgaatgcaaaagtcgaagatgtcaatggctgaagagatacgccaccactggaaccccgcgtattcttttataacccccaaaggcattcctattgctttgtactcttggcctcggctagtatctccggtcgatcatggctaatttttcctttaaattgtggtttgacagccaacagggtcctatgtgttactggtacaaaagtaccatgacgggattctagaaaggctagtgcctcggctagtactactgacctggccaaataatcccaaataattcccaaaatcccatccaaactcgtttcgaagtggatcacatcaaaggggtccgactctcttcgaaactaacgtgctcaggccgtgcggatgcatcggcgggctacaggctctaggccgaatggctccgtgaaactccgattatggcgattataggagtagccctggagatagtactttgcatttctatacaattccaactattctatactccgaatactccgaatgcctagtctgtgtatgtactggatagacggagtactgtatattatactctatatcctctatagggtaccctacatactcttcttatatgctccacaggatcgaccgttagacaaggacgcatagcaccttcggtacactaaaaccctcttgcatatctggtggagaagaatgcatcggtctagatgattcagtaatttatgagatgcgtattggatgtgttgtaactacggagtattaagtattctaacagtcgactagctcgtagactaggcccaagtgagactaagacgacgactacagggctagaatagatttaatttcttgtggcaacttctatgttcttttctataattatcaactctgctttatgaatataaacttgttatttgctttttctcttatcccttcccccaaatccccaaatcccccagaatccgggaacagccataatatccaccttggagtttggttccctatcttcacttcttcacttcctcttcctcttcttcttctcttcttctctctcctcccctccccctcttctctcctcctctcctcctcccatccttggggtcttatccccgtggccaattacctggatatgctatatccttgaacggccaatccctccaacttattccctgtgattaattacatcattgaaagaaaatgacggccctgttggcgccccgcgaaactcattcgccattctcggatcctgtgcggtgtcccgctagtcccactacgcagcgatatttcctaaaagatcacgccatccccgcaaaatcacccatgcaagatgaccctcacgcgacggaccccccagtcgcttcaaacctgccctctgtgctcccctcttccaacttcgctcctatcaccgagcaactcgcctatccatctactttaaacaccctcccctcggaaaacgaactcatcctacccgcctacgacacagaatgcttccacaatgccaaagacccagaggatgtcagcgacgtgtcgacagaatcacacccattttcgtggacgtcacagcctccatcggcagatgacaccttaattgaggatgagccatccaggcatgtggactatctttcacatgactggaaggaggaggatatctggtcctcgtggcgttatgtgaccagtcgaaggaacgattatagcaatggagtgagactggagaatgcctcgtggaggacatgggccaaggccaagcacaatctgaagacgatatcgccggaaagcctcaattggtatgtttttgatcttcttaatctttcatcttttgtttatcccgctaacctcgtactaggctcaaggactgcgatgtcacctggctctacgggccattaaaaagttccgtcgaacgtggaacctctccatctccgcctccaagttacttggaaacaccaacctcttatctagatcgaaagccaatcttgaagaagaagaccgcgtccgaggccatccttcagcgatccctgtctcaacatacgttactccaacatgccggagccattctcaaggcccaagaagccgagaacaactgggctcgaccctatttcccaaggtccaacacggacttggaccacttgcatcaccggactggaagctcgacctactctctcggtggcactctcactgcctcgtcagcatctggaatgacatctcccggcgaacggcgccatatccacttcaacgatgaagtcgtgcaatgcatcgcggtcgaagccaagggctacgaggacgattggccggctaccattggagatgagtcatcttccgacgacggcgtagtcttcatgagacaaatctccaaccggtcctccctaagcaaccgcagcactccacgaaacagcttcagcggcgatgggaaaaccatcgcccctctcccttcaaccacgctcaagtatcgtggggatcctccggagctccacactcagacaatccttgaccgatggtcccccattcccacccggacattatcaccaactccctctgtggagaccctacgtccatcaaggccatcagagcccgaggccaactttcttttggatgagtgcgaagatcccagcctggacttcacgggcaattaccccgatcatgatcgtgcatggtttattgaagatactgcatcagaccgcacgccccgattcactgcttcgggcatgatcatgccggaaggcgagaccgagacccccagcagtagtatatatcaccgggtcgtggacactgtgaacacagcccgagacattgctcatgtgatctggaatgtgggctggcgccgctaatcttgatcacaatcttcacgactgacgatggcggctagcccgtcgtacataatggaaaaaggcaggttacaccctgtggcgtttggggggaaagatgagcgtggattggatttggcgcatttcttttgtatagaatcacccgggactgattgtcaggaatcatgtaacgacataatgcataaaataacaaatattgaaacaatcacactgaaaacccagctatataatgtatagatccgcattggggaaattgcgaggttggtttatgataatgtagggggttgacctcgatacaactatttagtcactgttcttgtttcctcccaatcctcaacttcttgatactatatgaaatgttggaatactacttaatctattcatgcttaatagattaaaagatcgacatcaccgagatcaccattcaaattccaattgccccacagtcccccccccctgatctcttcctctccttgaacttctgccgaggtctttcttatgagtctcaaagacatggaaaccgtcagtgtcgccgaattggtcgagcgcctcggtagcgatgaagacgccgtgcgcaaaatggccgtcttcaagctccagagcaacattggagacccgtccttcgccgacatcttcatcgcagagggaggcctggttcgattacgctacttaaccctgaacgcaagcgggaatacgctggcatacagtttaaccagtttctcgaggctgctcgatgtcgacaaggggtgggagtgtgttgaccatgagttggttgagcgcgtgagttatgcttgaggcgattgcaatgccctctacctatgttgatgtggtcggattctaatgcgactatcttctagactgtcgagctgatcgtcacccaccccctggtcaacatcctccgcggcgccatgtccattctcgtctctattgtttcccacccgtacatggggaaccgcgcctcccagatcaacaactttggtttccgcgccctgaaacctgcaatcgccatataccctcagttcctggagatgctagtcagccgattatcctccgcggaccatgcgctgtgtgccaatgcgctccaattgataaactcgctcatgcgcgactcgatcacccacgacccggaggcggagtggcccaagtttattcagaggttacaggatctaggcgttatcagagcggtttacgtgcttatgcaggattccgcccttcaggacctggcgcatccgctgttggaattccagtcactcaccaaggtactgctacgcaagtggcgagatatccccgtcaaccaggagacgcctgagcatcgccgtgcgctgaagggaatttatctggccagtaacccggggaaaattcccgacgagcctacggagaatggcgacgatacacggcgctctagacgacatcatccggaaaagtggaggcggcttgggtttgagacggagagtccggccggggaattctacgaggtcggcttcctaggtatgatggatctggcggactatgtccgcagtcatggggaggagtttcagaatatgctcttggagcactctacaaagccagcaggacaacggtgtccgattgctcgagcgtcgttggccgtcacatcgatcttatatgagcatttcgaggtcgaaaagtccgacatggatgactcaaaaacataccttctttcagagtcccgtacgggctttgataaattgttccagcccctgttgttacattggacccgcctacatgttgccggcttacaggccttcttccgcctgtggaaggcgactgccgccgaggaagaggacttggacaagctcattgagctcgtgcgcatcctcattgagtcggtggtcggcggagctgctcggatcaaggatgtccaggaggtggaagaggaactggccgatttcgaataccaccgcttacgcgggctgcagatggaacttcttgaacttacgtacgaggatgcatggggccagcacttgcgacaggtgcgcgaggaacttcatcatgaggctctccaattcgtcaaagagcaacgaatccgatccttgctccaaggtagctggttcgctctggactcctctaagtcggagtcgggggcgttgcagaagtctagtgctacatatcaatatgcccagctctctcacaaccgacgatacctgcatttcggtcaatttgacctgatgggcgaacaagctccggagttggacaccctaccagagaaaagtgagtgtcaccgagtgctttcccgtaatcacactttttgtatgtgttgctgacaccgaaccgtgccctcaacagtcgatctctcaatggtatcatccgtagtctcgaacgtctccaccagcccagaccattcctccacggctacggtgaagactgcacctcggcaacccgcaaccaagatcaccatccacggctacgcaccctccgcaattaccggacacggaaaaggccacagccacgctcggtccgccagcaggaccactcaaaaggaggtagtcctgctcacgctgcggccatcctcgcagagcattgcgtccgaatggctagatggcctactgatgcttctcaaccagcagcccatcactgcagagacaagcaagctgattgatctaatcagcaattacgggttgaaaatccgcctgctcaatgtgcggtttgacgacgccactttcgcaggtgaggctccccaggtcccttcgagagatggcttggatgaagattactactatgatgtatttggaggcgcatagggggtacttccctctatatatgtgtgtcttttctcttgttgttggggattttggtttctttggctctgccgactcggattctggtcaatatacccgctgtgcgatctgtcttatgaatgtatctatttctaatatataatttaacgttagcaattgcatctgtatctatgtgttcatctcatctcacatctataaatctggcaaaaggcccaccgcttggcgtcataagcttatcggactcgtatctcaatttctccaggtttttgaccaactcatcatggatggcggtcgtcctcctaaaagacaacgcagatctaaggatttaaagcaagatgagccgaaaagacaatcaaaacgaaaagccatcattatatcagatagctccagtcctatcgaaccagcggaacccttcgctctctcctcacgccctaaaccctcctactcgcgcggcacaacaccatcaacccggcttccctcgtcctcaccctctccgatcaaaagaactaaatcaccagcaaagccagactcggactcgaaatcaaagtccctgcacaacttctttccgcccgcgacagagggacagcgatgggcaccacaaaagaccgagaagcaatccctcccgccggtcacggagaccgtcgacgtggacctgattgaggatgattatgactcctacgatgaaatcttcacacagcatctagctaatgagcggatgagtctggcagccatgggctctagccagacacgtcagcctgcgccaaagccagcgccgaagccaaagccaaaggcctcagtcaaaccaccgcggaagacgacgaaacggttccttctgtctacggactctgggaatggaactgcgaaggaggcattggctgcacaaccggctagcgaaccggaccgtcgaccatgggcgcagcggttcgctccggctaatctgggcgaattggccgttcataagaaaaaagtctcggatgtgcagcattggctagaggatgcttttgctgggaggcgtcccgaggtgagtttttgatttgagaataattcgaggttggggttgaatgtcgttctgacagtatgcagaggttactcgtcctacggggtccggcgggcagtgggaagacgaccactatgtccctgctctccgagtcaattggttacgatattgtcgagtggaagaatcccccggtttcggaatttggagctcgcgatcatcaatccgtgagcgcacactttgaagagtttcttggacggggtaataaatttggagggcttgacctcggaaatgccaccgagcccgattctcagaaagacgagaaacctcgggatcagcgaatacttcttatagaggagtttccgactgtgtttggccgggcgtcctccaccctcacggcgtttcggacgtctcttcaacaatatctagctgccgcggcgaatgatcatgcccggggcagttctggatcgaatcacccgcctatagtgataatcgtgtcggagactttgttgagctctgcgtcttcaatctcagataacctgacagttcaccggttactggggcccacaatctataatcaccccgggacaacgatattggatttcaatagcattgcacccacttttatgcacaaggctttacggtctattttggacagagaggcacggaactctaggcgtgtccagataccggggccaggtgttattgacagtatctctgaaatcggcgatatccgcagtgcaatctcctctctcgagttcctctgtctgaaaggggacgaaacgggaagatggggaggcagcgtggccaaaacaaagaaagctcgaggtgaggttgctttgacaccgatggagaaagagtctctcaaattgataactcagagagaggcgagcctgggcatgttccatgccgttgggaagatcatgtacaacaaacgcatggacccgagtctgatcgagggcgatgtcgagatccttccaccgccaccggactatctgcgccactatgcccgaccaaaagcctcgcaggtattggttaatgatctggtagacgagaccgggaccgacatatcaactttcatcagtgctctccatgaaaactacatcccatcctgcgatggggataatttcaccgactctctcaacgactgcatcgatgcactctccgatagcgatatcctcagcgccgaccgccgaccagggcaaggggcgcgcgccgggataggaaccggaatcacctctttcagtagcggtacagacgtgctccggcaggaagaaattagtttccaagttgcggcgcgtggtcttcttttcgcccttccatacccagtcaacagacgggttgggtctggagccggacgaagccgcgctggtgatgccttcaagatgttttacccagcttctctgcggttgtggagagaggccgaggaaatcgatggactgatcgactcgtggatgaaccgaacactcgatcctagacggcagcatctttctcaaaatggctccggcctcacgggggtcagttcctggaaaaatctccaggtgggaaggtcgatatccgccgactcgggaaacaaaaatgacaccccgagtgtggtcacgatgatgccccggcatgatctactgcttcatcagttgccctatatggctgcaatccggcgtcaggacccagattggtggcagttggataagatcaccagcgttcggtccaacgagaatcttcgtaatgatgacattgacgacatagaggagtctccagcttcgcggtcgcgtgggaaacaatccagcagtcgtgggtttggacctcgactgcaactgcccgaagagaaattgattctcagcgatgatgacattgtcgattgagcgtgatatttctgcgtatcatgtctatcatagtaaactatttaatgcgagaacataaacatgtactcagtatgaacaatgtagtcctgtatatactcttcgagactggtttgcatactagattataaccccttgacaatgaagtagttgttgaagcagtttttgataaagtaaagcatagaataagatgtgacgaaagtgacttatttttgctagcagtttacatataaagcgtaggtacctgatacgggagtttggcagaagcggcattagcggtagttacccaactaggaaggtacacctggaaatgcaagtgagtgtctagatcaatgccctatctatatgttgacactatgtaatagagattgttaaagagcttgcttgctgatttctttgttctttgtcacttgctagtttagcaagagattgggatttgcactgtttgcaggactatatctatgggtttcctatttcttgcttctcactcttctctccccatcttgggcctggcttgtcacatcacaccaagtacccttcaatataaacttcaatcgcattagcatgaaggttataaaagctatttacttgcttttatgaaagatacataccaaggcctaaacagggtgaaattctctatttacacttacctatcattcagaagagccaacatactatctaggcagagcttgacgagagatgctagaagcttacagtaccaagaccgagtttctttacttctatagtctcttttctcttacccttacttgaatgcaatatctatagcattcactggggttcatctttgatacagacttgtcgcaggtgaatgagtgcggacacgcttcccggcgcgagcatcctgtataggggtcgccgctttcatgttggccatgggtattcaaactcgacggatatggttcttttccttggtaagactgtcatcgtccggcttagactggtcgatgatacgccgtcttggtttccaacccccggcacgacaagaaggtcccagcaaagattggtaactgcgcggaaacatatccatgagttcatttactcaaagggtacggcgaagagaaccggaatttctacggaatttccctacaatggaaaggcttgcagccagtaagagtgccaggattctcttcgtggggagacatagaagtggcacacccttgtttcaactgccaggaacttctctcggtatagcggatcagcaggaggtcctccttgatatttactcttactttgatacaaagttggtgagctagcgctctagcccagtgattcctaatataaatttcggcctaggcgttgcccttgctatcctttctctcctcctaattaactgcataatatgtcaggggcttgagacagttaggggattaagagtaaaactatatcatagacagcttgaggggggctttacaatggtaaatccggtacatatagttgcatatatatctcgtgatccacaatcttatcttcagccccagctttctttcttttaaccacctcatctcacctttcataggagtcgccctttgaaactcctagaaggtcagaaattcaattcatctctatttgcaattcctctcagtcaatatcgctcacacttgaataggatgctcaatgatcatgaaccctcaaaaggacacgatgactcctacctgatcaatcgcactcgagtctcgactgtgaatcaatcgaatagaaacgcgaacgtcgcttcgcccccaaaatctcgatctcaaaaatccgaggacaagcttgattatgctcaattgaagaaagatgcgccgggcctcgttgctgccgccgcccatgcggcggttcctagctggaccagcatggttctaatggtctctcttatcttcgggggctgctgtgccaatgtgggtgtctagagaaacccccaacgctgctacggagccaaaacaggaactgatcctttacaggtctttgcgctagaggcgattatcaagtaagaaaacaaaccaggctaatccaaacacaacgctaatcctatatcttctccagagaacagcctactgccggtaaggacgacaaccagaaccaatgaaaacaatcgcactgcatatcctaacccaactcgttccacgtacaggtcccttgataacattcgcccaattcgcgatctgcgccattttcaccatcccaaccttcctatccccctcagccggaccacgagctttattcctgcgcccacgcgctattccactacgctcatgggcggtatataccgcttatttcatgagcgtcaacctcctcaacaactgggccttcgcatacaagatctccgtcccactacacataatcctccggtccgcaggccccgtcgcctcaatggtaatcggctacctatacaacggcaagcgctattcccgcggccagatcgcctcggtagcgatgctgacggtgggcgtggcggcagccgccatggccgacgcgcaatccaaaggcgtatctatccacgtcgagtccgatgcggcggatacaatcacgaccgtgacgggcttcacaatcctcgcgctcgcaatggtcctttctgcgttccagggcatctatgccgaccggctgtacgcgacttacggcagagactattggaaagaggcgcttttctactcgcatgcgctttctctgccgcttttcctgacgagttgtccgcagttgctgggtcagtggcgggtggtggcttcgtcgccttctttgctgtcgcatttggattccgggttgtgggggtcgtctggtacggttgggagcactgctttctcggtgctggggcggatttgccacattgaggctgtcaaggctttcctggcgcatctgccggttcaggtggcttatctggcgatgaatgcactgacgcagtatctgtgcatccgaggagtccatcttttgtcggccaagtcgtcatcgttgactgttaccatttttttgaatgttcgcaagttggtttccctgctcctatcgatttacctcttcgggaacaatttggctggaggtgtcttggttggcgcggctttggtgtttgtcgggggtggtttatatggctttgagggtgcacgtctacgaagcgttgccaaaaaggcccagtgatattatcatattagatagatcttgatctaaatgtctagacaaaatgccttttgcgtgagttttctcggttttaccttagagccggttacttctaggagccatgccacgaatagaggaaaaatatatcgatatcatgtgcaggctgcagtagttgtacataaattgagataaagcaacattgtccacaccatttgagtggaaaggtaaggcatcaagcatgacgcaaaatcaagatctcccaggctaccccggagtcagaccaaaataataaaacagttaaccatctataagacctcgcccacaatcttggcggcttccttgtacgtttccaatagccgctcacacttctctctctcggccttgatgccatcatcctcgtagagaagctcgccgaaaagatcttctttataaagttcgctcacgagtctgttttggaccacatccttgcagtggttgacaaggaggtgcatgacagccttggggacttggtctgcaatggtttctcggacgatgttgaagtatgatgagatgagacggcgaatgagctcggtttcgagcatctcacgttccgtgagtgcaggctccgtgttctcgttgggctgtaagagctgaagtcagtcataaccatctaaaatttaaacaacgaatgcgcagtggtacttacgaatacagatatgtcaccaccatactccgacggtgcagtgtatccctcagtcggcataatgggagcccgaacctcggcacgccgaatgctctggctaatgctcggctcaccagcatttggcccttgccggtgggggttcatgcctgccggtggcatggccatgttgtgagtaccttccttaccgaagaagtagttcaggaacgagtcgcgggcattgttcgagccaccgccaccgaacgcagcatggttagattgactgccattcagagaagcagcaatgccattctcgcctgtgcggccaacatgaggagacatgcttcgcgatcccttagaagagtgggttcggacggggaggttttgcttatcagaatattcttcttcttcaggacctcccgtagtcccattgggagctcccaattccttttgacgtcgcttctcacgctttcttttttcctccgctagcaaggcttttctttcttcgtcctgcttgttctgcatgattgaagacatggcagctgcggcaccaaggaagttaggatggttggtgttaatgtaagctctttggatcgagatcaaagattctacataagtcgagcagggccccaggcgctcacgaagaaggtcagatacgacctcaatcaactttccttggagacgagggaaacgcaggagctcttgattgccacacgtgtggcagatcttgataagctcctcatagaccagctccacgcatcgctgactgggtgattcgaggagtttaatctgtggtttgaccagcaaatcaaaggccaactccgggacaaacagactgggacgaggacctgtcgagtttcggatggccgttcggatatcggagacagtcaggttgtgagtgggatcaatggtttccagtgagtttccaaaaacagagttgaaaatgtagtaaatccttgctccaccgcatagctctttcgtagaaatctctgaggaagttccgtcgatagatgagatgaacgacgcggcgaacctggtcatctgctgaagaatcaatgatccccggtgttcttcgccactgaactgtttgtttccgtagctggccaactcttgctgagtctgacccatcaaggtgtttagccgagctttgatatccggaagccggtcacgaatgtgagacatcagggttgtgttcagagtcttggccaaaaagtgcgtaccgcagcggttggccatattccggtaagctggatgatgccggaagaactcagcctctgcccgcaatgcatctgaaagcgattttccacactggatgtcctgctgggaccgattgacaacgccgataaatccaagcttcaagggatacacacgtccagacaggatgtccatcgcattggtgccatggtccatgagatccagctttgacagaacaccgatcgtcctccggcccatgggatccacctgacgggcaagcttcagcgcctcggaattgaccagatcgacattagccggagagaccgcaagaataatgctgttcggcttggcaatatattccaaaatcaaagtgcgtgtttgtttttcaatgtccgacggttgatcaccaatgggcaccttcgtcaatccaggcaaatccacgagcgtgaggttgagcacatgaggtgagaatatcttgaggttgatcggttgtctattgatgcccttgttgcttcctgcgattcttgctgtctccgcttcgatctcttgcttcacttgggcaaagtcatcaaacttgcgtcccggctggtggtggaattcagcccattcgtgttgaccggcaacactggcagccgtgtgtggggtatggacctcatcgttttccggcttatcatcacgttcactgggcacgttgataagttgcaggataaggggccgtcgggtgacaattccgctacctcttggtagaaagtcccttccgacgatattctctaggaccgaagactttccggatgactgggaaccaacaacaacctaagagggaagcggggattagtcttgggttgaccgggtaagaaatgacaattccctctcaacctctgagagctctctacccgactagactcacaatttggggcaagtccaaggaatcattcccaatggtgttgaagaccagatcctgaagcttgttcactgtcacgagcagatcctcgcccagcgatgtcatgatgtcgaattgaaggctggctccttgagacacacaggtaagagttagagcccggagttaagaagagtgaaaaactagtaaaggtacacgcaaagtgaggtcgcgtgcgaacggtcaccgggatccctgaaggcctaagcaactctccttggaaccttggaacattgtttatggccactttttcggcacacgtgatgctgacataagcatgtgctccgatcatgacgtcggtgattcgctggctttaaaacacacatccaggcacgtggatacattgcatacatgttcaaaagaagtaatactacgaggataagatgtggatctagaactacaagacaatgagtcattcaaatgaaccttattgactcattttaattgaaagtggtagtgaactgggtatttatactgaagaaccaaggatacatagtgagatctagtttggcgaatcaatagaaatttgaatttcccctggtcgcattgctggagtcggagtatctacgcatgatccaatcattcgtccaagcgaacatagttggcagggaatagaccttgtttgccattgtactcaccaagccaccagtcgtcatcggggaattcctacaaccgggttagtactgtagatagtgatggggcaaagccgagaaaaacagggattgctccacttaccacgttggagatctttgcatcttcagggaaaccgatctcgttatcctcggcggcttcatagtcatacaaagctgtggccgtgacaccgttggagcttggggtagccactgatggtgcagcggcagcgacaggggtgggtgccgccgggacgggggcagcagcaggctctggctctggctccgcttcataatggtcggaagcggccggtacgtgtgacgcaggttctgtgtcttccacaatctccacatagttggcggggaagagaccacgctcaccctgagtattgacacccacccaccaatcctcgtcgaccatttcaatgtcggtcacatattctccctctcgcaattcaatctcattatcctcggccttctcgtagtcgtactggatttgggctcgcggtccgccttggggctgctcgggctgctgaggagcggttgcctcggccgcagcgcggcctaggtcgtgagaatcatcctcaatttccctctcgtcgggaacggcctcttggaggctccgaacaggcatagcagggggaggggaatattgttcctcgtgtgcatccgcaatactgtcggcagtgccgcggccaaccggcatggcaatctggatcggcgagctctcacgctccggggtgggaggtgtcggggagcgaggaggctgcggtggtggagtaggaagagcctgctgggcgtcatgctcaggctcagactcgacgggtccagaggatagcccgggtacaggaacagggcgactggcctgcggaacaggtggagcaggaggagcgagtggcgcaggcgcgggtgtgggcgtgtcctgagcgaactggtcacgaatagcactcacgtgaggttgtggtttatcctcttgttggtcattggcctttgcatcaacaggttgctcaggatcgtatgatttttcctgtgcagtttgaacgggagcccaggacttgcccgcataggagcttctccactcgctttggccactaggttggctttgaatcggggcaggagtagaggtaggctcagtggttccagatgacggggcgactccgcgctccttggctttacgctctgcccaaatttgagcgggtgtcttgcctccctcatcagcaaaagttcggcttgcagttccaatcggcgcgctcgtggttggcttaggcccgagaccaactgggaggggtggctttgttccagggaaggaggggctagagccaaacttgttggcaacccttggcttgggtagggtggtcaaacgctccgcggcagtagagggcgcaggtcgctcgggcaacgttgttggctgttggttgaatgcagtgctcgatgggacgttgtcattggcttccggcttctgtgctctggctcgaatagcagcgatgtcgactttgccaatgggctcataagagcccttgataattgcggggcgctcatctttcagctgaccagatgcggcagcttgtttccgaattgcagcaatatcgactttacccactggctggtagccacctctaacaacatcgctagaatcatccgatgcagtagcggcaggttggcgactccctgtggggtttgccttgagttcttgtaggttcactctagtgggctggtaagccgattgtaccttttccaattgggtgcgagtcacgggaggggcatctgcaccccatccatcatcattcacaccagctcttgaaggtgtgggcagtacgcgagcagctgggctgggagtgatgcccccagatcgagtcggtgtgaaagcaggcttgctagccacggcaggccggggggctggggcccgggctgaggcctcgcctactgaatacttagagccggaggaatctgccacccgctggacgattccctcgggggttagatccccatctgctcgggctgtgatctgcacatggtatccctatccagccaagtcagtttcaccgcgacagttgcatcaggggaaggaaactcctcacatgaaggaacttggcaactgcagccaggtggctagtaaagtaaccctttgttcgttccggcacaccttctccacaccagccaatgagaacgtttttgggaagaccggtgttggaatccgtcaccttcacataggcgaattgcacccgtccttcggaaaattcctcgatgagatccgccaattcaccctctgcagcacgattggttaatataagataatgggcttggttggtaaaaaggactactaacctccggtgctctggaccttaaggacactctccttacctccatcttgctggaaggcactaacaagcggggtagaaactgagtagacagcccattggccataggtcgcagaccctccgttcccagaagggggtggtgcattcaccactgtctgataactttttgatatcgaagggccattggacgagagattgagagaagccatgactttccggcgaataggcggggagaaggaagggaaagcttgtcaagtttcagatgtgtccacgtgggaggaggggtagctttttcttttgttacaatatctgtatctcatgcagtgtcagcgaaaagcactccagactgttggtgttggggtgggatgtaagttcggggaggggaatagataggagaaggagggagttgacgtaggtgggcatttgtaaacactgaccgggcaaaaaggataaaagcagcggggttgaatgctttcaagatgagaatatcgcgacaccaaagaaaaggataagtacagaatcaagaggaatatagagagaaaggtccaggagaacgatgaagcctaaaggtggagaggagagacgggaggttaggggaaaggtgttataatacgatacttcgtactgccaatacatgcacatgcttcataatatatgcaatgtattatgtactatgtagtatttagggagcatcttcacttcgtagatctatatagctttagaatttaaagcttgaagatgggtattaattctaattcagatattacactctatactctgtatcatatataaaaaatcaatcgtgcaagccttgtatagtcccaaagctatacatacatagttggagatgtgtctattttacgtgtattcttgtgtatgtattttacagctccggggcctggactttcttccccattcttcaccgacagagaggtggggagcttgagctctcgaagagtttttttttcttcttcttcttctctctggtgttctttggtttggagtatcctactttctaattgtgctaatccaattctatactgtccgaaatcgcattgttgaccttgtgtgaaaccccaagttatgcaataatctcatcacaacccttctcagttatacaatccctattcggtacctgggtacacataggatagcaaggggtcacagcagtcatgggacctactcaacccgatttcagtgccagtcagaatgccaacgcgcctgctgattcgtccaacaatgaatcggccacttcatccccgggtctcgaaggtcccgtggactctcctctccacgaaagctctaatgcactagatcagcccgcagaggatattttgcccagagaccaacagcagaaaacggccacctatgactatgcctatgagaagtccatgagtcacgccgaggcaagactcttctatcaacatcatcagctagccgcgcggaacgacaccctgccttcgagcccagtggccccagcccgctcaacattcgaatcacgccttgaagaatcaccgaacctttcggatccaatgaatagtcaaggccagatctctcgcgagggatctatggtgtttgaacacgaacccacaaaactacgattgcaatccgccagtgaacccaatccctctgtgtcacgttacctcgaagacgaccaagacgaggcgaacgattctgcccgaaatcaggcggtgattctagatgctgtccaagggcagggaccatactcggtggcggcggcgagtctgcaaagcgccggtgtggggatcggaggccctcaggttgctagcggatatgcgtctagcagtgatgctgtcacgtctgagctgagtgctatctactgcaaaatcaagaaactacttgatcggcgatcccagtacttggcgctttctttgcagggacccggagatgatcctaaggaccaaccagactgggagatttatcctccgcccccagaaccagcgtgggatcatgagaaggaatatcaccccggcaacatcggtgacccatctgaccttgcaggaaagaagaggaaaatgggccaagatattggggaggattttgacatggaagaattgatgcctctacccaaagaatcgccttggacgtataggctggatggcaacagtgtatatcaggtctttgattctgaaactgctgctgaccaacaaacacctattgttcagatcccctcgttgcgcgatttctatatggatctggacgccgtgatcgatgtgtcgaccgacggacctgcgaagagctttgcgttcaagcggctgtcgtacttggagggcaaattccaactgtatacgctgctcaatgaataccaggagatggccgacagcaagaaggttcctcacagggacttttacaacgtgcgtaaagtggatacccacgttcatcattcggcatgcatgaaccagaaacatcttcttcgcttcatcaagagcaagatgagaaagtccccggacgaagttgtccttttccgagacggaaaacatctgaccttgagagaggtctttgagagtattaacctgactgcctatgacttgagtattgatactttggatatgcacgtaagtctctcatcgcatcccttgttttgatgccgaatctttagaggatgaaggaagatgcagcctagatgcatcaacatttcctctacgctcactcttaagctacaggttttacttttactgactctgacttcgtaggcacacaccgactctttccaccgatttgacaaattcaatttgaagtataatcccgttggagaatctcgactgcgtgaaatcttcctcaaaacagacaattacatcaaaggtcgctacctcgcagagatcaccaaggaagtaatctcagacttagaatctagcaaataccaaatggtggaatggcgaatctcgatctacggtcgttcccttcaggaatgggataagcttgcggcctgggtagtggacaacaagttgttctcgcctaatgttcgctggctcattcaagtgcctcgtctctatgatgtgtacaaatcaagcggcatgatggagaactatgaacaagttatcaccaatgtcttccaaccgctgttcgaagtgaccaaagatccttctagtcatcctaaactccacgtcttcctccagcgagtggtgggattcgacagtgtggatgatgaaagtaagcccgagcgccggctgtacagaaagtaccccatcccccgggagtggaacaccaagcagaatccgccttacacttactggttgtatttcatgttcgccaacatcgcttccctcaacaactggcggaaacgccgaggattcaacacgttcgttctacgccctcattgtggagaggcaggcgacccggatcatctggccgtcggcttcctctgctgccacagcatcagtcatggtatcttgctacgcaaggtacccctcctgcaatatctttactatctggatcagatcggcattgccatgtcaccactcagtaacaacgctttgttccttacatacgataagaacccctgcgcgacctttttcaagcgaggactcaatgtgtctttgtctaccgatgatccattgcagtttgcattcacaaaggagcctctcattgaggaatactcagttgcagcgcagatctacaaattcagcgcagtcgacatgtgcgaactcgccaaacattcagtcgaccaaagtggatttgagctttccctcaaagaaagatggctcggcgcgaattgttccctgcctggagtcgctggcaataatgttgcaaagagcaacgtaccagatattcgtgaggcgttccgacatgaaacattgctgggagaatggtccttgtaagttgcctatcgtgcctttgacgtcaaagaaatgagactaactgtatatcgtctcatcaggatcgagcgatatgccgacggcaatgggaccggagaacagaagagcttggttccaggtccaccaggggaatcggtgtcctcgaatcatggtaaatctatcttaaggaattaggaattatgcggccgactgactttgaaattcttagatcacaatgcacctaaccctgagccgcaatctgagctaagttcaagtgtagctgacactactgatgcctcactcagtgaggcccatggtacagaccagacaaccaccgctccgtcgactccatcgacatatgtagctcgatcacctcgccttggaacgggtgagttctcgtctcctggcagtggaacaggagtcgggggatcagacggtctgccagaacagaagattttcccaggaatcgttcatgagagggctcgaaaggggactatgcaataggattacacgtgagcggctttacgtgacacatcacagactaaggggagagaacaaaatattggggtaattctaatgcaaattggctcctctatcggtcaagttaagaattcaagtgaccgtgacccggtagtagagtaccacgggcatgctacacatgtaaaatgccgacctctatcaaaaacccaagaacgcctgaagaaacagccacgaattcaacatgcaccacacgcacctcacgcacccgtttatgtcaatcaaacaccaatgcacgcctctcaaccgtaacatacaaattagatgtttcaagtacgtacttcaaatagcccagctgccctttcgttctggcattccccagccttcaggattgggatcttctccagtcataccaggctcctgcctcgcccattcccggatgtatagacggagcgctttccatcgtgcacaggcattcgcaagatcatccttgtctggggctgcaacatagcctttagcatcagttttcaagtcgtcccgacgaagagcctcgacgggaatacccgagattttgctgagttcgtaatcataataacgcgcaagacaagggtaacccagagacaagtaattataaatttgagtcacaaatccatcatgaaattcggactcgatgactttctggagattaggactcgtgggcttccagggactctgatttctgggcgaggttgcgagatgattcagatgtgtatgtgaaggagatgggctgagtcccatgctaatgccagactcatcgatacgaggcatgggggtcacaattccggggaacagaccgtgcccctcccgctcttggccctcgtctttgcaacaagtacccatccaaagaccagaaccctttccgccgtcccgaggaggcgatgcgtaccataagtcaccacagccagcacaaagatcatgtacacgagaaatcgcatcgaggctaaagtggtcacatattgttccctcgggtgaggcgcatcgaggaaggacgatgtccctgccaagcatgggcgggctcttgccattcttattgagttgtgatgaagattttcgttttccagatgcagccatagcccggatcctcatttcagcctcctccttgtggtggcgcatgtagtccagttcccaagacagatccgccgaagattgtcgtcgggacttgacatgatcataattaggcatatgacaatcgccggaatctccactatcttcctcgatggcgaaatgatcaacaggctcgtagacttgctcgttgggaaaggcagccaacgcttgctccttcaactggatatgtgcggattgagcggcaagagagagcaagaattccgaaacctccccattgggagttgcacggagtggcttgcttgtgcataaatctcgtgtaactttatgggaaggcccgggcggggaagtgcacgttgaatgcgatctggagttgtccgaatcttcgctgctgtcagaggggatcgatggaagatccggaactcgaaacgagtgtctgcgagcttgatgtcggcgcagaagattggaagaagaaaactgagattcggatggcagataagtgaggacatgggtatttatatctgaccatgatgttgtgtctggggaaatgattgtatggggtgctggagatcctacggcgttatgccgtttgggaaacgggacaggttcgctctttcgaacggagcgggtctcagtttgtatcaattcgggtttgaatcttcttggagccgttgatgtctgctcagacgacatagagttcctctcatctacctcagaagtcgaataagaccgtctcttactagtcttgcttgtttcaattggctcaggtaaaaatcttctggtcggttgatgtttactagggtcgtttgaatgtgtttctggctttgatggagcgggttgatttactccactcaaagctggctgctggacgttggagcttcgtgatacggtctcgattggctggggtaggaatctccgagggacccttggttgtccttgacattgtgcaagaccagattcttgtggctggtatcgactatccaaagaatttggctggtccccgtgaagagtaatcatatctcgagcgttgtctgtaagttgactcgcctctcttccatcctccgtgggcatgttagatttcccatgtgcttctggtggatggcccattatcttatcctcagtatctcagctctgaaccatgctcgtattgaatcaagatggttgacagagcataaccattttagggggttcaattaaggcacactgggtgtgtgttatcagtgggtttattgacgggcatgcggggtcgaaagagcggtctcgatgtgactagtagagaaacgaaaagaggcgtaacggaatgtaatgtatcagttatcatggatcgatcaaagaggcaaagtaacccgaatatgttcagaatgtacagtgtatcagaaatgcattttgtaaaagaagggaagtgcacatgtgagaagtggaaagttgtggtaaattccatacaaaacagggcacgtgcaagtaagttctcggccgcgggtaccttttatgacatcagctcttccagggttggctgttacgagattaccatacgcgataagggggcgataagataaaagtcatgaatgtcctcttcgatttcttttcctatgtctagtacagcaatggaatccacagacaagcggaagtttgacgagactacagatgattctcaacctggatcggtcgcgaagcagcggaaggtaatcggaccttctctcccgccacctcaggaggccgacgcggcgagtgaaactagcagagatgatgatgatgacgacgacgatgatttcggtccaagccttcctccctccggtccagtgagctctgtgcgacaagagtccacggctcctgatatatctaaatcggcggaaaaggaaaaggaaaaccagcgagatcaatggatgctgcaacctccttcccattccgactggtcttctaaggtcgaccctacacaactacgaagtcgcaagttcaatacaggcaaatcagccacggcatctaaggatctagattcctcgtgggttgagactccagaggagcgaatgaggcgactacaggatgcagtcatgggcgttgctgcttcaaaaaaacagcccggggactacaaaggtccttcaaacgcaaagatgatggaggatcaaatcaagaaatacaaggtaattattgggatatactttcctcggaaatttcatactttattctctccgcgttcttcattttgttctaacatacgtcttgtaggagatgaccgggaagaccactcgcctagaaacccaagctcaggcaccggaagaagaggatgatccaagtgcgcgcgcatttgaccgagagaaggatatggcagttgcttcgaagatatccagcgcgcagcgccgggagatggtcaagaaggcagcagattacaacacacgttttacaaagggcagcttcttatagccatatttcttgtttatagtttgaatacccaagactttaggaaagattacaaaaaaagacaggccgcttatgcggcagaccattttcatcactaaattatgcatatctttcatacggagaacggagaactctgcgatctaatcttcgcccggttatccggctgactcggagtggccaaagtgcgggttgtgtcaaccaatcaacgtcgctgatattcaccttagttatcctcctccctaattcccttaaattccacctctggatattccgttgttcctactcatctgtcgtctgtctttctctcaaccatgtctttctcaaatctggtctccgatattgccttccgtgatgctcgtgtggatgatggcagctcccaaatctcccatgcccgatctcagatgtctcgtgcgaccgctcggtcgtatgccagcaccgcagccacaagcataagcatttctggcgaagtctctagccagctacatgctggctacagtcatcctctgaccagagcatggcaggccgataggcaattaacaaaggtccgccctcaatgatgttatgaaatccataatatgacacacttaatcgcactggcaactcgtcgctaatacattatctctgcaggatatgcttatctatcccttgttcgtcacggacaacccggatgaggagacatcgattccttcgttgcccaatcaacatcgtcgtggaatcaatcgcctggttcctttccttgccccccttgttagaaaggggctgcgctcgataatgctgtttggcgttccgctccacccgtccgccaaagatgcactgggaaccgccgcagatgaccccgatggtcctgtgattaaagccattcgtcttctccgatctcgtttccctcagctttatatcacagccgatgtgtgcctttgcgagtacacatcgcacggtcactgtggtatcctacgagaggatggaaccctcgacaatgggcaatccgttgaccggatttccgatgtagctgttgcctacgcggcagccggagctcactgcgtcgctccatcagacatgaacgacggaagaatccgagcgatcaagctcaagttgattgaagccggtttagcccaccgtgtacttttgatgtcttacagtgccaaattcagcggctgcttatatggaccgttccgcgacgcggctggctcctgcccctcattcggagatcgccggtgctaccagcttcctccgggcggccgcggtcttgcccgacgtgcgatacagagagacatggccgagggtgcagatattatcatggtaaagccagccagcagttaccttgatatcatccgggatgccaaagatttggcacacgatcttccagtggccgcctaccaggtcagtggtgaatttgcaatgattcatgccgctgccaaggccggtgtcttcaatctcaaggacatggccttcgagagcaccgaaggcatattgagagcaggcgccgggatcgtgatcacttatttcgtcccggaattcctcgactggctttagttgtttattcaacttgattttaactgctacatttctccactccaaaagtgcgattttcgggcctcatattttccgtgcgattaccatgactgcatttctacatctgacatctatctatggtgggtctgatgtattgaatatacaatgctacttgaaaactggatagattccccttacgcgatatgatgttttcttttctgtgtgttaacgattaccctttattacaatgttattaatttcttctttttcggtgcaaccggcctcgggatagtgtagcagatgtttgatttccaatcgacattaaaatatgtagcagaatcgagattggattgaggtaaacaggctaaataatgcagaaacattgtgtataaactgcaagatgaccccgattcgccgcacagaacgctaataccatacaaattaaacggaaaccattcgtcagggacagtggatatcgaaatcaaagacaagatcagtaagaaagagacgaaataaataaaatcgaaccggaggaagaaatccatgcgagtcataattttgctctcccacatataggcgtgagtagaccagcaccgtagcgtaaggtaattggacatttatacacaaatcaaaaacacgtcacttcgttcacatagcaaagctgggttttgacccctgaaacatgtaacctgcaatgttcgtgttgacaatctctcccggggcgacgtaaaccccacgagcaagacgaactccggggtagatgatgcagcccgcgcccacatagcaatcttcttcgatgatgacctgacggccttggtaccgactttgcgagcctttgcgctcttgcatgttgggatgagcggttgaactaattattttgacgttggggcctatccacgtatgggcaccgatgcggataacacagtcatccacaaacaggcaattctccgagatcatgacatcttccccgatatgaatattataaccataatggcaactaaacggagcttcgacgacggccccttggccgatagacccggcagagcgaggcgcgttgcttccggctgggggattgacaatggaagatgccgggggtacgatgatctccttcagcaggcggttttgctctttcacactgacgccggtgagcggattgcaggcgttgttgaatttccacagtgcgcctcggcaacgatctctttcctccacgaggtggacgtcaaagggtcggtagagtttgccgttgatcatcttttccttctcggtctcatcgctcgggacggtacggcccgagagctgatgctcgatgctgagtgccatccgagcctgcgcctgcggactatgggtgtccacagttgccgcgggcaatgttcgctgctcattttggaacaagggcatattggatttaggatgagatggatgactgaggtctcgaagtgaggacatgaccggatagtcaggtttgggacgtccctcccgcgatagctcatggatgggtgggacttcccggtaatcgacgacttttgctatggattcggatggataagcggggagaccggcattggacccggaccccgggccggcgcctggccaagcttgttttgaccacgcatggttggatggtgtatgcgttgggctggtgttgtattgttgaacagggcggtcattatcctccaccactagaggcctgattttggtcgcgtcgacatgttccactaagttgggttgtcgctcttgctgtcggggtacttcttgcatatacaagccattgatgtctgaatagccttctttggattgcaaagggatcggggtttttgtactagatggcttttgccaggtgcttcgggatgaatagccttcacacaggaagccgccacgaagacagttgttgcctacaatgcatcattaatgtcgctctttcggtagaatttggacagggaataatttgtacagaaaagaacgtgggaattagagccattaggagttgacttacatgccggatgttgctcgtcgcatttcttttttctgcgacggcaggtcatacagcccgtcttcgttcggttactaaatacccgcttcctctttggagccacctgcattgccccatgtcgatctggtgcataactaggagaggatggctgctgagcgcccggggtcgagcgatttgtcatagatctttcctgacctgtctcgcgttgaagagcgtctgctaggtgggcatccgatgcatccatttgctgggcccgttgggcctgggtgatcagctgagaatcatattctgaccaaggactattggcggaggtctggcccgcatcattgccctcggaccggtgagatggggttgccgaatgattaccacgctccatctccgaggtcgatcctggcacgctgccattcggattggtttggttgctctcggcaggacgggtcaccggactcctggaggcgttcacggaatctcgtcctcgggactctgatctctttctcttattcttgttgtgagagccactgggggaagatctttgtgaccacttctcttggtcattggcaggatcatcccggtcatcgcggtgactaggatctgaggtggtcttttcttgggtcggcgcacgttctccattggggacggaactgggaggtggaccattcccatttccatttccatttccatttccattcccattcccattcgcattgacaggagccaccgtttctctgccattaactgcagtaaatcgggatgggctgtgttccgtccccgtttcggccccagagtcgtgagtaccagtcatgacggatgcagcaagagccgtcattgtataagccaagaaccagaaaggagaaacccgagaccacgaagaacagggctgaggttacaccgagaggtgtaagaaactattcaagtaaagggcggatataggcaagagttgtagctcaattgccaagcaatcgcccccaaatatgagggatagtctcaacacgcagagacccaaagctttcaaggttcctcaaatacttccaatatcttaatcaacagctctgtgttggggttgtttgcgcggaattgcaagttaagtcacccgcgggtggggcgaggagatcgggagattatcagagatagtatacaagatgggttgaaaaaaagagcattcaaccaagtggctttttttaatagaaagagagataaaagaaaggatatcaatgagaaagaagtagccaagggctcaaatatatagagtagacagagagagagagataggtagagagagagaaagccaaaggtgaaggaagagacggaaaatgggggagacgagggaggggggaaagagactaataaaagagaatggggaaaacaccgagctaggaccctctcactctctcactctctctctctctctggcaagaaaagtacaaataaataataaataataaaaaagagtaatctccaataacttgacagcaaaaaagagggaaaggggaagttggcgcgcgatcggcaatgacggcgtcacacgcagcaccaatcggagaagcgatcagccgtgtcctagtgaggcgcgggtctgagacatggcccatccgctttggactcttttctgcgcgcgttcccagtctcttcccctctccgatttcttttttgcccacattcgccattgccgcccgtgtacgcggtgtcccgcgtataagggcggttatgcgcttagggagacgtcgacttttggtgccttttttgagatggatttaatggcaccgtggtattgaattttcgccttgaaataatattctgttccttccccctaattcttcccaacacccgagtttttcaaggacctggcgcccatctcgggaattattgatgactgcagcgtgccgcggcgctaggaccaaatcactagaggagtcggctgagcacggatacctcatgggcgctttgagtgagtttacttttctttgttttaatcccaacttcatattctggacggcgtacggggtatactttcatctattattataccgattcgcagcatacggagtatacggagtatatgggatatgtctatagatattatacattaggtgtgtataaattgttggcacctgattcagcccaactctcagaatcccatcactatcactatcacttttcgcataaaagcacctgtcataaatataaaaaataataaatatccaatgtgatatcagtgcagtgtacagtcgttggccggtgattatactgggtaaatgatccctgggcggtatccccgggcggtgggggatcgcatgctgactaagatctcaacagagggatcaagttcaaacatccaacgcgctctcaccgccagagtctacgatagcttccttttttgacccccaattttcctgcctgttttttttactgccttcagagtctggtaagtcttgacctggattcacctcctctagtcccccgtccaatcatttctcatcctgacatcgtgctgatcccccaacccctccaaaggatctctaccccaccgaacacacttgcttcttattcccctctatcatttgatactgccctgcagccgccctggcaataccataacctgtccaggcggttcccatcatcctcccctcttgactctcgtgtctcaaaccctattccgtcatcagaggcgatatcgccagtctgcgccgagatgtcgatttcggtacaagagctggacaacacggtccgagctttgtttgaaggcaaaggtgccgtggtaagtcgaacctgtctcctctacacggcttgggtcgcagaattcatggaatctgtgtatcctccgtggagctctggggacaccaacactgacattgagaaccgtctagcaaaaccaagcacagcagactttgacagaagtaagcgcatagcccctccacaacgtcatatgaattgaacactaataatccctgtgctattagttcaagcaaaatcccgatgcctgggtcaccgtgggcaacatcctccaagaggcttcataccttcaaaccaaatgtgtgtcttgagtctttggcaatctcccttgtgcctggaaatgcctgggaaacacttgctgattttcacagacattgctctccaagtcttagacaatgtgattatgacccgatggaaggttctaccaagagaccaatgtcagggtaagaactacatgcattgacctcgtcgttttacctccccatactaagaacgttcttcataggtatccgcaattttattgtgcgattcattctcgaaaactccgaatccgaagagaagatccaagcggagcgccctctgttgaacaagctcaatctcgttcttgtctccattttgaagcaagaatggccgcacaactggcccaccttcatcaatgagattatttcctcttgccatgccagcctttcgatctgtgaaaacaacatgacaattctccgtctgttgtcggaagaagtcttcgatttctcgcaagaccaaatgacctctgccaaggcacggaacttaaagacctctatgacctcggaatttgcatcgatcttccaattgtgctccgcggttctcagcactgccaaccagcccagtctggtgaaagcgaccctcgaaactctccttcgatttctgaactggatcccgttgggctacattttcgaaacccccatcatcaataccctcctcacccgattcctaggagaacccgagttccgaaatgtgactttgaagtgtctgactgagattggtggcttgcaaattggcgctccttacaactatgacgaacgattggtgcacatgttcaccgagaccctgaccaccgtttccaatgtcattcctctgtccttggacctgaagcagacgtatgccatgagcaatggacgagaccaagagtttgtatcaaacttggccttgttcctctcgagctttttcagtgctcaccttgatgtatgctcccttttcctttaaccatgtttttttagtctgtttgatgctaaccttttccttcttttatagcttatcgaaaagttgcctaatcaagattacctcacgcacgcacatttctatctgattcgggtcagccagatcgacgatcgggaggtgttcaagatttgcttggactactggacaagactcgtgcaggaactttacgaagagatgcagcagctcccaatcaccgacatcaacccgctggtctctatgagcgttagtggtttggcgaacggtggtgcccccaatcctacgaccctagcgaactacccattgcgcaagcacaagtacgagactgtgttaacaaaccttcgcaccgtgatgatcgagaagatggtccgcccagaggaggtcttggttgtggaaaacgatgagggtgaaattgtgcgcgagttcgttaaggagagtgataccatccaactttacaagacgatacgcgagtgcttggtctacctgacccatcttgatgtggtcgatacggagactatcatggtggataaattggctaagcaagttgatggaaccgaatggtcttgggtgaactgcaacacgctatgctgggctattggttcgatctctggagccatgaacgaggaaaccgagaaacgtttcctggttaccgtaatcaaggatttgcttggcctcacagagcagaagcgcgggaaggacaacaaagctgtggtggcgagtaacatcatgtacatcgtgggacaatacccccggttcttgaaggctcactggaagttcctgaagacggtcgtcaacaagttgttcgagtttatgcacgagacgcacgaaggtgtccaggatatggcttgcgatacgttcatcaagattgccaacaagtgcagacgccatttcgtggcacttcaacctggtgaaagtgaacctttcatcgaagaaattgtacggaacatgaggaagatcaccatggacctttccccgcaacagattcataccttctacgaagcttgtggctacatgatttcggctcaaggtcaaaagggtctccaagaccgattgactgaaaacttgatggcgctccctaacaccgcctgggatcagattatcgcggaggcaaaccaaaacccggcgattctccaagacgccaacaccatcaagattgtcggaaacatcatgaagactaatgtcgcagcttgctcctcgattgggacctacttttattctcaaattggtcggatctatcacgacatgttgaatatgtaccgtgctgccagtcagctgattaatgatgctgttgcaagtgatggtaactaatccaattcacgctgacggacaccgaatttcttactgacacaaaaataggagctattgcacccaaaacccccaaggtccgaggacttcggaccatcaagaaagagatcttgaagctcattgacacctacgtggacaagtcagatgaccttgagatggtcaatgctagcatggtaccgccgctcatggaggctgtactgatcgattatgcccggaacgtccccgatgcacgcgaggctgaggtcttgaatgccatgactacgatcatccacaaacttcacgtatgtttttcgccctgctgattattggtgcccttatttgatagcctgctaacatgtcaatcagaatctgatggaggataagattccagccatcatggacagcgttttcaactgcactcttgagatgatcaacaaggacttccacgaatatcctgagcaccgggtcgagttcttcaaattgcttcaagctgtcaacctgtactgcttccaagcacttctgaagctcgatgctgcgcagttcaagtttgtcattgattcatgcatgtgggcgtcgaagcatgacaaccgcgaggtggagaacactggccttacgatgtgtttggagctgatgaacaacatggccgaaactgaccagcaaacctcgagcattttcttccgcgagttttacattccaattcttcaggatgtcttctttgtcctcacggatagtgaccacaaggctggtaagtaatgtcctttgtccggatatgaagcaagaagctaacaatccgattttttaggattcaaatcccaggccatgcttttgtcgcgcatgttctactttgtggaatcaggcaaaatccagcagcctatctactcccccgagcaagccccgcctggaacttcaaacaaagaatttttgcaggagcacatcgcaaatctgctacacaatgcattcggcaatctccaagagtaagctccctcggcgtcggttgaaaccatgcaagagtatactaactttctccaccagagcacaaatcaagcagtttgttattgggctgtttttatacactgatgacctaaacaaattcaagactcaccttcgtgatttcttgatttctctgaaagagttttccgatgacaacgcggagctgtatgcggaagaacgagaacaggcggtgcgtgatgcccaggttgccgagcgtgaccgagctatgaaggtcggagggctgttgaagccatcggagatggatcaggaggatgagctatgactggacgaagaactgcgtaccgaatttgttgttgcctctactggttcccctgggcatgagcaagaatcaaggttgacctctcagaacgacagccttgacggctggtccttctacgagctctagctcatgggaagttatgtgccgctacaacaaaggaagcattgctctggaaagatgtgtgtgaatctattcttttatcttttctttttatcccccttggttggctatcgggcatgcgagagaccccttccctgtctgagcgggttctttgaggttggtgcatcaacacggaacggatttacccattttgtcctacgtgttctctgcctattcaggcgcgagcttgtttgatagcttttaacgttaaatgattaaaaaaaatctccaatcaaaagatacaagaataattggccgcttgtggccttgtcatctctttatggtagttagagtttgtttaggtatcttccttctctgatctatagctagacgatgaaaaaggcgaaaatgactgtaaaccgtacagacatttctagtataagccgggacatactggaaccgtcgcttcctacgcgacatatcgtacgttaatgtggggagatcggaaggcggtgaatccttatcagttgcatcatcagaaaaagtagcccccgggccgccttcgcggtgattctattctacgattctttgattccttgactctctaagccacatcactctattccatccccatcacaatgtctcgaacatgccagccaattgcttcgaattcattccaaaccacgacagagtcctcagactcctcaacagcccacttccccccaaccctcaggctacgagccgaggaagcaactgacaccagcgaagcaacatcgtcatcccggcgaatccgatggagcgaagatgtcatagacaacgagggcatgggcaaaaagagctcaaaaggtaaggatatcatacatctacatctattccatctacccgcaatgactccccaaaaccaccagcaacaatctaaccgccaccagtatgctgcatctaccacaaagcccgcccagtgggagaaagtagctcagaagagtcctcatccagctcatccgaaagcgagagcgagagtgaagacgaccgtcgcactgccagagtcaaccgggctcgccgcgcacacccacactccggagaccgggaaccgcacgacgagcacgaagggtgttgtcctgaggaccacggctcaaaaccgaaacgcagtcgcaggaagccgagtccgaatgcatacgagaagatgcctaagccgtcgaagagccagagtcagaatcagaatgagaaccaggcgcggggtacttgatctttattttatgggggggtggctttttgattggcaaggaaatgcaatgcgtgataaggcggaactgggaaatgcctggggattcttggttgggtttggtttgggtgcccgatgcacggccagacgaatcatctagggttgtatttcgccatgtctatgcgcggtgtgtatgacatttgcacgacgctgggacggagacaccccatccggtcggtggcatgcaggaaaatgtacaatggcatgatcgaagagtcaagggaggacatgccgaatccatttccggcgcgccgcattgggcgtggcgggtgaatggtcactgcaagaactacttggtctacttgaaacagatagagggaattgggtagacaagttaatgaaatttgtattaagaagatgtggaacgcagtgagggggtatctgaaacatagctgcagcccggtccgggctataatgattgtactccgtacataggcaaaggataaagaaatcctgttccgaaacgctaaagtggactttataccatcatgctttttctccttgcagcaacacgctggccacgtctgacatcgctgtccattgtagaaccgtttggccccggtccaaatgagtcttcatcttctggagagtcgccgtttggggattgtggttcaccctggtccgtgtcgtattgtgccatgtctgcagttgtatttttggggtttgacgagtgacgtcgaggctgacgcctcgaattcaatggtttttgtgatacttgggccgagatatctgcgaggctatcctcaatctctttcttgaggccagagcttggtttccccacatcggggtcgtcctttggggctgacgacgccttgcgttttctccgggagaccattgctagcaactgatctgaggattcatccacggtaaacagatctgagctctgcgccgcaagagtgaaatcagcagggagagtaccatgagactgggtgttgccgccctctccgtccaaactttcccggcctgcctggaaactggaggatcttcgcgatccaagtgcaacagcatcgatcatttccttcgtagggcggcgcatcttgtcccgtaggttaggctctgcatagctaaccacagcaccacgacgtcgtgaatgccgagtggcagactcttcctccgtcttcattgtattcggatgcggtgactgttctggctggcgtgaggcaggctcttccacctggggaggagcagggcgagcgcgcttttctttgtttgaagaggcgcttctggacactcgcggcttttgattgacagtgttaccactgagtttgtcgacattcttaactttctgtggcgagttgctattctcgtcgcccttggtgggcctttgcataagcttagagtcctggtacgaagacatgcgggccttcttcggagagcctagattggaatttgcactctctgttctaattgttagctacactcattgtagagatgagaaagtagaacatacttggctcgaggaccctccgcatagatagaacgggggttcttgatcctcttgttagtttgacatggctttgagtgggtgactggtctcgctgtgtatcttcgaatgggatcgtttgcttttttggggtatggctgggccgggtgaattggaattcgtcgtcgtcgacatcaaggttggaagtgaacctgtcatcgtcttcgggtacgtattttcgcttcgttgaaaccgatgttgtgtgctgtgttgtatcgatgggtggacttggttgccgatctgtcggcggggggctaatttcaggcgcaacgatcgaactcgacctctttttcttcttgcgtgtctcgagagttggaggaaatgatggctcgggttcttcgggtatatcgttgtttatttcggtcctgaatgttgattctggtggtgatgggcttgaattttcgatgagtgcatccccttcctccggcataaagctgaatcgaggaggggagtctagaatactttggtcgtcttggagcaggctgtcaagctcttggggcctgaataagatgttagcaatttggaatgacccaaaatctcgaagattcttactccagagtccgtcgagggtaatatttgtcctcaacaatggcaggaagccttccatcttcgccttccatgttttctgtcctaggtctcgactctgccgcctgttttggcctatcgaactgtgtgtcgcagagcttgcccaccttgcggggtaatgagcccaaatctgcggccaaattgctcaactcggctagtttggcatctagcttggatttgatgtcgtatattccattgtgcaacattttccccgcttccagtcgttcggtttcctgggtaagattgatgacctgttttcgaagcgacacattttccgaaattagatgtgatacttctgactctaggctgcgaatacgaagagattgcaaggaattcactctcgcgatctcccgattttgtcgcacaaatcgtcgcttcactggatagaaaacaaggaggccatatgtcaactgctagctcaaattttgtagtatagtagtaaattgcacgacttacacgcttcaatggactcagcaggagccgcatagtcattcaaccgagccatggcctaggctggaggggatagcgaccaccgcgtaatcagacggattgagagacaatcctggtgtgcagatggaatgaacttgaatttgatatcgagtccacagagtacacaccaggaaatgacgtgtgttggggcgagtcgtgagtacggggatacgaagagagacgagaaggtaaacagcgacgaatgccaagcccttgttgacgtttgtccgcatttggtttagcttgcccgttcagtgtttggatgactcagcgcccctcccagcctggagccggggtcatttaggcagcttactttgtagagttatccaacagccctagaggtacagactttgacagatcgcgttcttcacacctcgtactgttttgtcgttccgctcgctacacatctcccacaatggcatactcctcacggccaagctcaatgcttccaggcgctccaggtggctcatctatgcgccagcccggtggttcgcaatcgcagcaatcttcggcactgtcggcccgcattgcagccaaaaaagccgagctggagaacctgcgagagttacgcgatctgagtggaaccttggcgattcagatgcaagctttggataataagatctccacgttgaaagatggcaccgaaggttggcctatctgtttctattcgaagggctgatcgctaactacctgttttaagctgttgcgtacgtgctttccaactgggataatgttctcagggccatcactctggcttcgagtaagcgctattttcttacattggaattctacaactggtactgattttatcctgtaataggcaaagcaggcggactctacgaacccgagtcggatagtaagaatgtggaaaaacgaaacgatcctcgcctgccatccacgctggttcgcattccagccgagccacgtgataagactggcgagtgaatcagtcccttcgacttcagccacccggctgaagcaccctggatgatatcatcttttgcggcacacccggattatttgtggctgaaagtttgataggtaccccgtgggttcgcgatattctccggttatcttcgcgctcatgtgtatcaggctacgtaggacggcgtacagaatcggcgattgcctttgagaatgcactcggacctacttggctcctgtcacagccaatgagcggccttgccctcgaaaaaaaacactatcagaagaggcgagttcatggaggcccaatcatgggacttctcgtcatctgtcgcagaaagcgcgatttaactgagaatccacgagaatccgtttctcgcgtgaccagctatgcagagtttggcgcatgcaataaagattgttatctcgaaatggcagacaaatcagaagacagggattaaggagatcatttatttttccccctcagtttagttccttttgaaacttctgcactactgcaaagatcatcattggtaccggaatagatgcacagcagggaagatgaatggacgatgatgtgattggcgggtagagggtagctcaccatgtaccctgcgtactatccaaggggatagttacaagttaatagagtctaagtttttcttccggcatcatgagacgggacgcagagctaatggcgctatgatgccgatccgcagaaaagtcttattaccagttcgaggttcctgcagattttaggggcaaaaaaggcgaacagactctctagcgtgtgttttagtgtctctctagtggctagttaggggcctacacaggtacgtctccggagtggttatcacgtatttcaggccattggtacctgagggggtacttggggcagaagtacctacttatcggttgattgctggatagctgatagaactatataacgttataagaagtgcgatacctagatatcaagtacccccatccgtatcctgcgtatcatcttccaaggttcttttccttaagcgccccaagcacgactaaaatccaagccccctcttttccctgagcacaacgtgcccttcggattcgacatgcgcgattatctttccccgcaatagccgtgtggcttttgcactttggccgctgcatgtatttatatcgatttgtctttcctcattccattgcgtggtatggcatgatcgctgtgtgacacttcaacaatgtcaagtttgatgaggtgatctttaggcttctttacatcttacctttcttacttccggacttttgagctttgatctttccattctcttctatatacaatcctcattatcctcactatctctaaatctaaatctctcaatcttgcaaccttgcaaccttcaacgttacaacattaccatacaacattacatccaacttcaatttcttgctttacctacctcaacccgagaacatacatatacaaccatgtccactgaatggtctttggacttctgccttgtctgtgaccgtcagaccttgggcgctccttactgctctcaaacgtgccgcctagccgaactggatgagacatccgatggaatgtcacgaagatcgagcgcatcgtctacacattggtctgagatcaaccaggcccaagctcaagtcgaggccgtcaatgcccacccccttcgaaagctatctgcctcctcctctcaaacctcactctcttcgctcaagagcaacacccccaattctcccaattcccccaatgtggccgatcggctccaggatgaattgcgtgattatgcatcttgcttcgaccaagtccgcgacctgaaacggcgcatgaccaccacataatttcaatttcaattcgaacccaaactcaaactcgaaaactgggcttctcgagcccatcctcccacatctggtggtgccgagggtacccaaatgcatgcagccctcatgctgcttttctgctttctgctttctgctttctgctttctgctttctgctttctgctttctgcttttgatcatttgcatacacggaaaagaggcgttgtttgaaaatatacattattgcgtctatgtttacggttgttctttctgtttttgtggatcagccttcccacttggtctttctcacgaacctatacccccccaattgttatatatatcatgatcatcggaaggagttgaatccaggctcaggtgcctcacctaattagttatctaccagactgcctataatcaaattggaattatggttgatatttttaagaaaaaacatcttgatgtctttagtaggtctctaccaaagcccaattcgtatcccccattgggtaggttaagtgcgtcatgtcaatttcccacgtcagtcaatgtggggaccctgaggaatgtacccgatgttaaccgtccaaccggggaatgctagatatatcaattagaaccactcctcgacccatcgacaacacaccaaatctgtatggagccagcaattcgagatgcaagcgcaagcacaagctctagcccaggaccgccatataccctttgaacatcccacggccggattcggctctgtgcagaagcaaatgccttcccgcccaacttgctagatacattcactgcgcaagagccttcaacagcgccttttcattcttcggcacaaatcgaaccttgtacttttgaggaatagccaccaaactagtcggatccgagttaccccgaagaggatgacagtctgttttatcatgagattccagacggaagctgttcaaggtccggatgaagacgaggtagagctcgcgattggctagcagcgaaccggcgcacattcgatagcccataccgtacgtaaaaagaggtgcgtcgggctgctcgagccagcgctcgggacggaactcatccgggtcagtccacacgtcggggtctatgaaggattagatgtgttggatctattgccagatggatatcaagttcgactcacccatgttgcatgcccaggcattcaagaagaagaccgtgcccttgggaatggtgattcccttgtaggtgatatccttgatggaggtgcgaggaagtgctaatcgcagcacagtgaagtatctcaggtatatggttagttcaaggactattcatagctcatggcagcgatacaaccggggacataccgaaggcattccttgaccagagctgcaatatacatacacttctgatcatcgtcagaagaacacatgggatcatcctcgccatacatctcctggattgccctggccgcccgatcctggatatcaggacgctgagccagcaagcccagactccacgcaaccaaagtggtgacagtatcaagaccacccgaaagcatggtcaagctaatcgacgtcaactcctcactgttcagcttcgcctctttatccagaataacattagcctggatacaaggcttatgtgtcccctttgccatgcgctcatccaaatcactattcagcgcaccgaggtacttatcacgacggattctcatctcggcggctttcttcgaattggaactaaaggggttcaaccgcagaagcgggacataatcctgcaggtttccggtggtgcttcggaaccgactgatctcttcttccacctcggtgatctcatcgaacaggtcctcttcctgcgaggcgatgcgcacgccccagttcagagtcaacgccaaactcaagctcagacgctggatcatgggcatcgggtcgacgggtgtcttcccgtggtttccgtatcggtacagctcttccacgaaggactttgactcgacatccaagtgtgtcacgtacgtgtcgacagaggggcggttgagggcagatgcagcgccctttctacgtcttttcagggactcactatagggcgaggtaccgatagtcgttccggcagtattggaaacaatctagtcaagtatggtaagtttcagttacaaaaggcacaactcctataatcaccttatggaaagtataagtctcaggcctagagctcaaagcctgtgcattctgaccgaaaagcacctttgccgatgcagcagagttgaccacgacgacggggatgttccccagctggatctgataaacggcgccgtgcgttttcgaccagagccgatactgctccgcggcattggtgcggatctgcgccaagtttccaatcaatggcaatccgcgaggacctttcataccctttacgcgggcggaatcacgaatgaactcattgagaatgacatagaggacggggacgaggaggacagcggcggctagcgagtggtacggatactcaatcacgctgccttgtagcgatgccaggacagcggcgatagccatggtgctggtgctggtgctagatgggatagaatctgtcttggaggtctgtagaaatcatgaacatattgtgaaacgtaaccctaggctacgggatatataagtagggtgtcataggcctaagcgtcgaggcttccattgaatggaacatttccgtgttgtcagggtcgttcaagccgtgatcgtaacctagtgctttcttaccccacattaccccaggtcttccaagtcgtgtcccgccagtctatgcactgcggcgatgtgctcaaccgagggcattccgcactccggaattcttccgcttgacggggttgaaggtataatttgtactgcgttgatctaagtggaccaaatgtgcggagtatgttaactagttatagttacatcttctactttatttggttgtttgagtcggtgatttcatgtgtttttagggttcgcgtcgctcttctatggtattttgcttcttttatatatttctcaatttgatggtctttcaagccttggcatttgtgttgaatatgacatataacataaactgggtttaggtagatcgtggtataatgcccctatttgagatatccaccagcaacagaaggatctctttgccaaattaggttttaaggggtgctttttcctaagaattagggaatccttctgtcagattttgaataactacacagcacttatgattttttatagtacgggtatgatatcatgggataccattgtcgcataagggactagtgaagatcatatccactcgcgcaaggactcccttctctttttttaaacaccttctagaaagaagagcctcaattggtaagaatgatttcacaaccgaagattccatggtggggctactgcatatcttggaagaaagatgacatttttgaccaaaaccggaatccaacctgcagggattggcagtggggccaaggataagaacaaggataaagatatgtatgcacagggggaattgagcaatcccagcaagtggagtagatccaaacaaggtgttcataacggggggcccctgggctccgtgggccggatggggcaaggcaagatggctgtctgtgactgggtggatgtccatggagctctcagtcaggtggccacgaagagattgatcaaggtccagacccattgagacagatctgcagtcccgggcatcaacaatgaaatgtagaatcggcttcccgacgcggttggtatcatattgattgtcgtccttggggttaggattgagcgcaagttggaagctgtccaggtggaattcgggaaatttcttcgcgtcatgtgtcgtcgaaaaccggacggagttcccgagccaattggtgtggaaatgaggaaagaagaggtaggtatagcccaatccccactgtcgcgctgctccaatggtgagctgtcctgctgccatgacgcagagctttgttgtactcgtgacacccctgtattcatagtggaaggtgtagcgatcaagtattcgatactctgtaccttggagattgtcgcaaatcttgcctttcatagaggtgctgttgttgacaggtttattatatcaagttcgtccaaaaaaaaaaaaagagggaattctcatagctgtggtcttttctcccgcccttcgcctctccccttcagttcttcctctcccacttctcttcctctcctcccccccccaatcttctcctctattcctccgatctccctcttccggcgcttattcttgtaaagcaagtatcccggatatttgaacatttgaccacattacatcaccgtacatcggaataatcgcagataatggccgctcggcactcgcgcaagtttttgcgacctctcctctacacatcggcggcccccgccgccggaggagggggtnnnnnnnnnnnnnnnnnnnnnnnnnnnnnnnnnnnnnnnnnnnnnnnnnnnnnnnnnnnnnnnnnnnnnnnnnnnnnnnnnnnnnnnnnnnnnnnnnnnnnnnnnnnnnnnnnnnnnnnnnnnnnnnnnnnnnnnnnnnnnnnnnnnnnnnnnnnnnnnnnnnnnnnnnnnnnnnnnnnnnnnnnnnnnnncgggcgccgccgcaggagcaggtgttatctacatttcttaccgtccgcgaaatattccaggcctcgaagcccctgccgttcctccgccaggttactacaaaggcaagctggtcccgcccagtttcccttccatcaagtctcgcctcgaacagattgaggacctcaagcgcagtgaggaggaggaggaatatgatctgcttgtcattggtgccggagccactggagccggtatcgcattagatgccgccacacgaggcctgaaggtcgcggtggtggagagagatgatttcagttcgggtactagtagtaagagtaccaagctggtacacggtggtgtccgttaccttgaaaaggccgtgtgggagttggactacaaccagtgagattgtcctttcttcctcggaaagagatgaggtcggaatgaccgcatccccgcgcatcccttctaacaatcgcatcgcagatatgcgctagtcaaggaggctctcagagagcgcaagtacttcctaaacacagctccccatctgtcatcatggctgccaatcatggtgcctgttcagaaatggtggcaggctccgtatttctgggctggcactaaggcctatgacttcttggctggttccgagggcattgagacctcgtacttcctcaccaagagtaaggccattgatgcgttccccatgctgaagcgtgacaacatcattggagcaatggtgtactatggtgagtagccaacacggaccccgcaaatgatctaggctaattcccgatcagatggtgctcacaacgactcccgcatgaacgtctccctcgctatgaccgctgcgctctacggtaccactgtcgtgaaccacttggaggtcaccggactgaacaaggatgcatccggcaggctgtgcggtgcgcgcgccaaggacatcgtcgcagagaagaacggcgaggtcgccaaggagttcaacattcgcgccaagggtgtcatcaacgccactggtcccttctctgattccatccgcaagatggatgagcccaatgtcaaggagattgtggcccccagtgctggtgttcacatcatcctgcccggttacttcagcccctcaaacatgggtctcattgacccttccacctcggatggacgtgtgatcttcttcctgccgtggcagggtaacaccatcgccggtaccactgaccagccctgtgagattgaggctcagccccagcccactgagaaggatatcaactggattctttcggagattcgtggctacatcgcccccgatatcaccgtcgaccgaagcgacgtccttgctgcctggtctggcatccgtcccttggtgcgcgatcccaaggtgaagaactcggaggctctcgtccgcaaccacctggtgaccgtctctcagtctggactgttgacttgcgccggtggtaagtggactacttaccgccagatggccgaggaggccgtggacgaggcagtcaaatcgttcaagctcaagccccgccagctcaacagccttcccgacatcagtggtgtcggaggcagtggtctggttgctgacggtgccgttctcgacggtagctgccagacccaccaggtgcgcctcattggtgcccacggttactccaagaccctcttcatcaaccttatccagcacttcggtctcgagaccgatgtggccaagcacctcaccgagtcgtacggtgatcgctcatggcaggtcgctgccttgtcttcccctaccagcgaacgtttccccgtgcgcggctgccgtatctcccctatgtaccccttcgttgatggtgagattcgctacgccgttcgtcacgagtatgcccagactgccgtcgacgtgattgcccgtcgcactcgtctggctttcctgaacgccgaggccgcccttgaatccctccccactgtgattgacacaatggccgaggagttgaagtggaccaacgcccgtaaggatctcgagtggaaggattccttgactttcctttcatccatgggtctgcctaagagcttcatgggcctgtcgcgtcatgatgtccagaatggccgtgttacgcaggttgatgatgccgagcgtgcgactttctcccgtaaaggtatgtttgtaacaaacatttcgatgaaccacagtgctgaccattctagaaccccccgcggatatgattgagagtgacgttcgtgctactattgaaccccctgccgcaacacccgcgctcggttagacgtgtggcatatatagaccggcttgtataaatagaagcgttccttttttttgttccaatattgacactatttaaccagggactttggaaaaagaccctcaatccaagaccttaagatgacgctttccaaaaacacgcgcattcacattcggaaagtgccaccctgagcatgctcgtagtttcaatttcttcaatttcttcaattccctcatttctctccatttctctatatcttgtccacactcacacaccatgaataccagtcagtctgatattgacctccagtcgctgcgctctgtgaagcgcaagttggacccggagaacgattctgttgtaccaaagccagatctggaggagtccgatccctttggagacgaaagccaatctggcgtgaagtacaagaccatggcgtggtggtaagtgtttccttttccacaggcaggatgaagctcatcctttcaataggcaagccggcatgagtaagtcaatgtcttgcatattgcccagctttctctaacaaaccggtcagtcatgatcgcagaaaccatctcgcttggtattctcgcgctgcccaaagcgcttgctgttctaggtcttgttccgtacattctcctacccgctggctgcaaaggccgatgagctaacctgtttgttcagcggcatcctaaccatcctcggggttgggatcatctcgacgtataccgcatataccatcgggcgattcaaatgccgccatgtccaagtgcacagtatggctgatgctggtgatcttctgatgggaagggttggacggactacactggatgtggcccagctcgtcttttttgtgttggtcatgggaagccatatcctcactttttccatcatgatgaacgttctcaccgaacattcttcctgcaccatcgtattttcggttgtcggtctactcgcctcattcatgttgacccttccacggcgacttgagaggctttctcacatctcctccgtgagctttgtgagtatcgtcggagcggttcttactggtatgattggagtcacccttgtcaaacaaggcccagtggaggtcccagctttttcgcctccgcccaaagtgcatgatgcgtgccttgctattgcaaacataatatttgcgtacgcaggacatgttgcattctttacccttttctccgagctcaaagagctcaaggacttcccaaaggctctggcgcttttgcagatgagtgaaatggtcttgtacacagtggcttctattgtgatatatgcctatgttgggccaactgtcaactcacctgctctcaattcttcgggacaattgtttcgcaagatttcctatgcaatcgcactacctacggtacgtatctttttccgtgtacttcttttggatatgagcttaaccaatgcacagatcctgatcgggggtgtggtgaacgcccatgttgccgtcaagttcatttacgttcgtgtcttccgggggaccaactcgatgcatacccagtcatttagggcgcgggtagtttggactgttacatgtgcggggctttggatcttgtcgtggatcatcgccgaggcaataccggttttcaacgatgtactagggcttgcggtgtgtactacctgtccctgaccccacctgcagcgagtactaatcattccaaccagagttccttatttgctagctggttttcattcggtctacctgggctattctggctctatctgaaccgaacttgttggtacatgacctggcgacagagggcattgtttggcttcaatctttttctggtgtttcttggatttgtcattgtaagttgagctctactgtggtttgaagggtcgagttaacctacgccaccagtgcattgtcgggttgtactcgtctattcggtcgatctttaacaaccttcgcgagggtgtcggaggaggtagcttctcatgtgccgacaattccctctattgaggcagtcttacgacaaagaaaatgatttggatgggggtgggtaggttaggtttggaaatgggcaattacactcgggtcacagcattaacgaagcacgaagaacatacgacgcagagaactatccagctacatgtatagaataaattgagttctcttgcacagtttcacagatgtaggcgatatgcaaggagccgagattttgcggctgctacccttcaacggctaagtggcatgtgttagatctcacaggggatccttgtcctcccgatcggatcaaaggcagtttcaggatttcagggaagacaaatgacatcttttatgcaggagatagcataactatccatccagctgtccttttcggagaatcaggccatacctaaagttagagatagcacggtgtactccgtagttagctggttgctatatttcctcggccgggaggtgtacatcacgtgatcggtttcgaatcatttagggtttacgtcacgttgttatataactccaactaacattgtcgtgtttatctattccggccttgcagcccagatcatccgatgaaaagccgaggctgtccaggggcgtactccatccagcacacaaaacgagagttaaggatcaaaataggggggggggcaaatgggaaattgccagacatcttacggagtatgcggagtatgtatgtggataatgatacctaatagacattaacagtactgcgtacgtggcccataaaagctagttagttaatgaatgactcgcatatggtaaccccctgggagttagtgggctcggggaattggctgcagctactccgtccgtactccgttgttaggtcccgaggtcgcatacccgttggtatgtaacaccatctcggactagattgatatgttaattatgttagtgttagtatcgtgtttcgagaagaatagagagaattaaataatgccaacgcaaaataaaagcagaaccaagaatttaaatcaaaagtcaaagaagcggggatatatagcagaccccgtagccaaagtaacaatagctactccgtactccgtaagctacagctgaaataatatccacttcctgacgtctgataaatgattcttattaactaaattatatttttagcccaagtgctgctcccatatattgggttcccctcttttttttttgcgtagaagcccgacgtatgtattgtgtcccaatcaagacagggatcagggccccatacttattccctgtacagcaaaggccccgaagggtgcagaggaaaagtggaaacagaacaacggcaaggcatacatgcatgccatcatcacaccatttccccgaggattggggaaggaagggcgtgaccaggaaaaccggtccttcgatttgctggatttgctgtgtatcgaaatcacatggattcgatccaatgatctccccaaggcaaatcccaactccaccgcttcttgtcttgcacgcaatgtagatcaaccttgttgatctccgtgcagatgtcgcatgggaaggaaatgaagcggtatatcccggcgggatctgattctggttctggctgtaggctctggtcgactcgaagctggaacgtgccgtggggcaccagtactatgcgaggagaatgcgacggaggggagtaacgggtctcgtgatgtgggacattgggcaccttcgaacctacacccgcactcgtctcgctgtaccgcgcaagttctagagacatcatgcagaacctcggagaaggatatggaagaccctcttggctagtgctagcatcgcgtaccgatgaaccggcaattcaagcgtagctagttggcaacgccatcgtagttcgtatttccttggtagttgttccagaaacgagccacggcgctctgggcgacgggcgagccacggtagcgtgtggtaaggaagtaattgaagagggcgaactcgtctggcgtgagcacatagctatctggttgggcttggatgcgattccacagttcggtaatggcagcctccaggacggcgaccgattgggcattcacggggccatcttcgcattcgcgagcgtgttctagagcctgtcgaatctccggccagtttcgtgatagaggaaggttggccatatcgttggtgagggggggtgttcagctggtggtgtgctgtgtttgagggtcgttggtgagggaggttttcacgattgatgtttttgttgggggggaaacttgggagaaaagggaagatgtgcgccgcgagggctcgtcacaagcgaaaagggtttcaggccaagtagaatgcggaagagatgagactgtgcataagaccaaacaagaaaatccgaatcttttttctcaataattaaatgggaacaggtgtggagcaacgggagagggaggggaggggggaaaaaccgggccagtagtcccgaaacctatattcatgagtgtgacatccgatagcgaggtaaatgcagatggaattagttgacctgtaggctgtgggacgaggttcaggaacagatcggactttaccccgaaattggagtccacagatgagaagataagtccaagggaagtccaacggttctcctttctcctagagagacgtgaatgggaccacacgccattggcgagacctggaaagacacataatccataaggccacaagggtgtagtttgcatgggctcgggattgcgccgcgctcccttggcgtaacggttttctcgggcaattttaatgacatgctccggctagcatcgaactaagccgtctaggacccagatgagacacggtggagacgggtggaaaccgtcacgaacgtgaaggtgattcgtcgaggagttatagggttcaagggtcagtgtcgcttcaagccgtcgactgtggttggaggaaaggggggggcgttaatggccccagagcaatgtccggtgcatcagttaagtggaaccggtgctccggtccttgtggtccttgaggctcgtgggacttggattctccgaagcattccaatcattgccgagttcgatataaacattgcgttagcgttgttccgtttcggactttccacttacatatgatttattcgttcacatttttatcctggcgattgatctcaccatgcgtgccatgacgatatgtactgacttccgagacctcacacagttcttgttttcggtcacgagcgcctttaactgtcgaatctcaggggttgttcgtccgaaacccaaacgctgtgtttctaggaatatcaaaattgccgggtatcctctccgttgcagtccgggcacgaaatcacattctgtatgagtcccgatgtcgcattcaggtgtcctttttttattctcattatttttattcccgcaaatgtctgtttacccctttcgacagaggcaacgcgtcgtagacatgaggcatttgatgcgttctagcgagtgcacacgccattgttttggtccaattctgtgaattagactcttcgatgtgatcttggccgttcgaatatgtcgagcttgaagaaaacatgcatatcgagggatgcgatatcccaagccctaagaagcgtaagtgggaagcgtaggaaggcgaggggtgaccaaaagacggcaaatgttcgaaagcaagcatttgccggtcaacgccagcagcctagaccggatagattcttttcagagaagtcagagagaaggacaacacagaacaaagtgaagaaaaagcgggaggtgcctggaacacggtccacataaaagcgcaactctaaatgtcccaaggccccggcttcccccttcgagcatcttcccttccttcaacctcacattcctgaagagctttgttccttgctttatctctgctctttaggttgaactcagtactgccaactcgcaacccactttagcaggcagctctggctctggaatagcggcaattcatggggtattgcggcctaacacgagaagaagcaagaatgatgtccgatagaaagcatctgccatggtacttcgagggaccagggcattttcccggtctcggccgcatgccagtatgatcaggtcatggaggtcttgaaccctgctacagtgagctgcgtcagactttgaagtttcaggagttaaattttgactctgctaataccaagctcaataggaccaccccagacaagacccacacggaccttcaagtgacaagaaacgaccttaccttagataacattccaaggaattctctacggaacgtaccaattgtgccacatattgcctcgaatgcagattggaagtctgcgaagttccaaacctgcatccgtgattgaagaatactctcaaatagtggcaacatacttgagctagaatagcccgcgcaatgcggtactcggtgaggatgtggcacaacttctgttagctgtcattttggaaatggtagggtcagagcaggatcctgatcacgaacccatccggtatggccaaggagatcttatgggctgtgcgaaccctaacgaaatctcgtctgatatttcagacagaactagcaatgtaatattccgagacactgataccgttgccctaccggcctgattattcgttgatcatttgagtctcttcctgaactggtgtcttggcctggagtagccttcgttgaccgagagaaacttggtatgatacgggcatggcacataatgggattattgatcgattgtactaattgatgctcgagtgctgtcattgaccacaaaagctaatataccagtagtataatttgttttacgttcagatggtcaagtccatcgttgctttcgattgttgttacttgactctgctgatgaacaacccacggggctctttcttgcgtaccaagctcttcagggctagttatatgtcaattataaagtctcgcactttttgcttgttctaccccgtctgtctagctattctcttgcattctaaagctacacacgggtgcaggttctatacataaaaactaggcaaggattgcgaattcaaatattctagaccatgtcaaaggtgaggttttacgtagtctatagaattcggataaggttcatactctatcttaaaggagttataaactgtgctcagtctctttcccttgctttttatacaaacataagtaccctgtagttcccagacacaggtatttgcatattcacataaaagccaagcttagccaaattgaccggcaagcacggataagaattgcccagctttatttttatgacatctcgagggcgaataaggcttctagccctgctggaggcctggaggcctggagccctggagatctatactgctgactaagctatagataaagattcccccaccagcgcgccatttcaacttttgacctgcgccgatcacgaattgtgagaacccgatttgcccgaacaaggtcatttgaaagaaaagaaggattgaatatcgtcgccatggtgttctatttcacatcgaatgtcgttgagccctccgcctttatttatgtcggcaaggacaaattcgagagtatgtcaccgacttggtcaacctagggaataaacttctaacaatggtgtcagacgaggaactcataaaatatggattggacaatgatgtctggtatgtttcccggtatatatttgtagaacttcggggctgatattcttgcgcaacagggtcagtctttccctgtccgacttgcgacaacgccaatcgccctaaccctatacatttgcagttccacgtcgacaatttgtcaagtgcacacgtctacgtacgccttcgagaaggcgaaacatgggacaacatcgccgcgccgcttctagaggactgcgcccagctcacgaaagcgaactccattgaaggtcagtcctcgacatgaatccaagcattcgtaccgatggagactgacttctgggaaggaaacaagaaggacaacattaccattatctacacaccatggtcaaacctaaagaaagacgggtcaatggcggccggtcaagtcacattccacaatcacaaactggtccgcaaggtctatgtcaagcagcgggagaacccaattgtcaaccggttgaacaagacccgagttgagaagtaccccgatctccgagccgagaaggaagaggacacgaagaagaagcagcgcggtgatcgcaaggcccgagatgaacagcgtgcgaaggaaaagaagaagcagcaagagtatgaacagctcaagtggcagaaagatcatgcatatgatgatatgttcacggaagagaacctggaggctagcaacaaccaggaccgtgatgaggatttcctcgacgacttcatgtgatggacaccgaaggaagatgaccttttcctgtgtgtacttttcacagccagcgaactgaaaattataccctctgcattctataccacggaggatgattgatatgagtacaacaaagcagtcctcttatccctgttgcctctttttatctactacggtcatatacaatgatatagcgagatagataaatactcaaaacccgacgtcttactaatgtcgtaagcatgctaggattatttttcaatggacatacaccatgtgaattcccttggcatactatgggaactacgaggctcgcagtgtgccccatacgcacttcagtacagaaccataaaagatccaaacatgtcgaggtagatacaggccaaaaaaacacaccaaattaaaagtgaaaattaaattaaaaagacaaccctagagaagtagaatagccctagggaggttgatagattaatcatcgagccatagggcggaaagggcgctaagccgtgttgacagcttaccctgtaaccttaggaattcaccatcttcctctcccaaggcctttccaaacaccacacagcatgagcgagggaattccaccgtctgctacaccaagtaagggcattcattttgtgaattggaacccgctgaccccgcaaaaggcgcaaagtccaagaagaacaagaagaaggccgcgaaagccaaggccgactccaaggccgacgagccccaagaggatgcgccagctgatcataatgacactgatgtatgtggtaaacctcccccgattgtcattgtacctttgctgagaccctacaagaacgagcacaatgatgccaacgaggccgtacaagtgccagaatccaacggcgccaagcccgccacgatagacggcagcctgcctgatcggtctgtcaagaaccaggagtccgtggctactagcgatgcccccccacaaaccgataaccagtccgaccccgcttccgctggcaccgagccaaaagaccgattcgatgcacttgttcgagatcgcgactcgttacgcgcggaagtagccgatatgcgaaaatcattggaacagattcagtccaagcacaccgcagacatggaagccctgcagcagaaattggaggacgcggagagcaaaaaggagcaggcggaaacgcagttccagatgctcttggaacgagttaacaccataaaatcgcaattaggggagagactcaaggaggatgctgtgcgtggctcagaactcactactcgggctttttggctaatcctgccctataggaggaattatctctagcgcgatcacagatcgaagagctcgaagatgagaacgaccacttgaaggaagagctcgattcaaagtccaaccaactcttagaactatcgggcgactcagcagagagagagaaggagctgtctactcttcgggaccggacgaacttatcccagcagaattggttcaaggagaaggaagaattgctcgcgcaggagtcatacctccagtcggagtttgaacaggcgaaggaggctatgcataattgggaaatccttgccatggaggagcggtctatccgagagaacctcaacgagaaggtcggggatctggaggagcagctcagtagcctgagagatggttatgaacgcgccacccaggaacgcgacacccaacagtcaacagttgacggccttcagcgggctttgcaggaaattcaattggcgcgaaagcaagagctgcgggagcttgtcgagagctctgattctcaactcgaggagctcagacgctctctacgggaagcacagaagcaggccactgacgctgacaagggtctgcagaaggcccaagaagagattgagcgagtccgaccatttgagaaagaggtcaaggagaagaaccttctgattggcaagctacggcatgaggcagtcacgttgaatgatcatctgacgaaagctctacggttcctcaagaaaggaaagccggaagataatgttgacaggtatgtccttgttacctcgaactacctcggtttcacactgacttcatacagacatattgtcacgaaccatttcctgcacttccttgctttggaccgatctgacccgaagaaattccaaatattgcaactgatcgctgccctattaggttggaacgacggtgagtactgctaaatgcaaatgaaaatttttcgagccgatctaattatcaatagagcaacgtgaacaggcaggtcttgctcgcccagggacctcgaatatgcccgggaagctccgagtccctggcactcccctccgcacgccgagcacgccaaatctagcggagttcatggacaacggtgcctctagtaaggagacattggccgaactatggtctaatttcctggagcaagaagccgaggtgggtaatatgaatccatcgcgacgaggaagccaccaaaccctgcctcccaaatgatcgagtgcagaaatgtatgtataaagcagggaggccaagtacttggatattgatactttgatacattggtatttgtcctttccttttgtttgatacctcgcatgtatacaacctatataatagccagcgccaagaaatacaaaggcccagatgaatttgttccgccttcctattaaataaacaggctaagctgtattgggacggaacaaagccgtcttcagctaaataatcgctttgttcatttttatttcagtccttatatgcctctcttgtccttccgtgggttttcagcgtttttcaaaccattagtacgcgcgactcactctgcatctacaatggcctccgctggtaagtcgaaatgcaccatggcagaacataaccccatgcgacgcagacacaactgacaggaccacttctatactaaagcctaccgccctattgtgatttccggcccatcggggaccggaaagtcgactctgctcaagcgcttgttcgccgagtaccctgaaaagtttggattttctatctcgggtcggtgccaatacaaagggaggggttaaatgaattcgcaaacggctttgctcacgcgccccctgaatagaaaccacacgatccccgagacccggcgagcaacatggccgtgaatataacttcgtcacgaaagaggcattcctcgacctagtggccaacaacgggtttatcgaacatggttggtggacactgcgcacgctacaagaagagaagtcggacgttagttaacggatagcgcagctcaatttggcggaaactactatggaacatctgtccaggctgtcaagaatatcgccgagaagaagcgcatctgcatactcgacattgagatggaaggagtcaaacaggtgaagctgacggacctcaatgcggtaggtgtcctagacaatctgataatggtgcgctcctctgatgatctctagcgtttcttgttccttgccccaccttctctcgaggtgttggagcagcgtctccgtggccgtgggactgagaccgaggagtctctacagaagagactcacccaagcccagaacgagcttgagtatgcaaagctcccggaggctcacgataggatcgttgtgaatgacgatctggagaaagcatacgttgagctgcgggattgggttgttgacggtggtaagttcggtgttgcgcaatagtacactacattatgcataggaaatgtgatttaatcgacatagccaaaaaggcgacatccccgtttgatatctttcaatccaagaatagaagtctcgtcaagttaaaattaagaaaactaagtacatggaaagcaccagagatggcacgagcacgggagcgccaattctctttttccccggcaatacaagctcaatggttctcccaagaagacacaagatgggatgtaggatacgataaaaacaaaacgcaaaagaaaggaaaaatgggatatctgcaagggcctgctggcgtcaaaagaggacagtaagttttcgaagagcgccgtcgcgcaacggtcacagcgctcacatcagacatgaaagatcagagtttagtatccgttcatgcctgtgcgctgcgagttgcggctcagctctcggtcagcggaggggctgataggccggtttccaccggtgtggccaccaccggcagcgctgctttccttcagggcaagcagctgcttggcacggaaggtctcgtagtggatctggctggtagtctcgaccagatcctgaaggtgggtgcgggtcaggaagttgcgcaggtagacaaattcacagtggttctcgtcctcgacgttaatgacaccccagcggttctggcggccgcgaacctgcttgccgttgacaacaatggtcttctcactgccaacaaccgagaaaggaatgatgtcctgtaaccagaggtcaatatccaatcagaatagctctacctgggtcaagcataccttgatctgagcgttgatagcacgctcctcatcatcgagctcgtcattatcgtaagggtacatcttcaggttgtggaaggcgaactcctccttgatgcgctccttgaaggcctgacgctcttcgagggtgagggagtcggacttggcaataacgggaacaacgttgacgacatcggacagcttcttcagaacaacgatatcgatgggcttgaggctatgcggggtcaatgagttagtccagaggagctctcaggaagctaaggaatgcgcggggtaagctcacgcatggccggagggctggatgaagaacaagcagcagtgaacacgagtatcttggatgtaacgctcacgctgagcggtgagttccttgcgcaggtatgccgagtgttgatccttaatgtacttgacaatggggtcccagctgatcatgattagcttagacctagtggctccatcttgatggggcttgaattaccatcgatcgttgttgacctggtcaccgtaaccaggtgtgtcgacaatgttcaagcgaagacgcacgccgttctcctcaataactagtcacccgtcagctattccgcatcgagctcaactccctgatgacaaacgtactgtgcgactctgtcttgatctcggtggtggagcgaacgggttcattgggggtgagacggcccttggagtcaatcaggtgggatgcgaagatagtgttgatcagagtcgattttccgagaccagtttggcctacgcgtgaaagcattagcttgaggctttcatcggcgcgcaggtattgcccaacacataccgacacacatgacattgaactggaagccacgcttcaacagcttgcgctcgatttgcgaggtaatgctgtcaaaaccgacatggctatgggggaaaacagtgggctgttgagccgtagctgcggtggtagcggtggccattatggacggagagatgatattgaagctgaacgaaagacagaaatagaagccccaaaaagacccgaagagaagagaagtatgtagttgaagcaagagcaccccttattatcgtcctctttccgaactcaggggtgggctattcctaatcgggcctagcgtctctccacgagaaaactaccgtcttccccgattgcgcttttgcttcagaccttgtgatagctcgcaccaccagctgaggacgaacccccgttttttgttcttgaaaaataccctcaccatggcattgcgcctcctccctttcgctccggcaaacatgtcgcgctcacttctgtccgagtacctccaattcccccgactcgctcggttcctcccgatcacacccatcgcgaccagcggattcctacaaccggtttcgatctctctcaatatcccatccctcctctccgatctttgggattccgtcctgcgcgccgttcctaagaagaagacctcccacatgaagaagcgtcatcgacaaatggccggcaaggccctcaaagacgtgaagagccttaatagatgcccgggctgtggccagatcaagcgtgctcatcttctgtgcccaacttgtgttaaaggtaggaccgaagcccaagctggaggaacatatatgtgattattgcggagaagctgactagtcaacagacatcaaggaatcgtggaggactctggatatggcatgagagcactgtaagaaataagggcttgttcttggggaatcaggatcaacattccaaaatcccaggctcaagctcaacaaaagagattgtatttctagaattggatgtggatacatgctgcatggcaactggcgtcttggttttgcgggggaaatgtttcgatatgactttataacaatccgacctaggtcggatttgaacgctgtgatcttttcaatttacctctttccatgtaactccggagcaaaaggcactacggagtacaattgtagatgttatggtgacggcggctagtccgggtgggaataattagacatattcatgctattacgactttactgctctatatgtgagcgtatctgcctctacttggctcctacttggctcactactagctttatagccacgtagtcgagacaagaggtactagatagatacatgtagtcaataataccaagtacacagtaaacagtgactatttcaaccctgattagctccaagcttaattttattacctgctatccaataatatagagacacttagctcagtagagttgttatagcacggtatatatacctaatttgcatgtggtaactatcatcttcaacaagatgcctctatcagccgtaaagagaaaaaaaaaaggcgccgataaaggcggaacgcgccttcgggccccaacgtcattgctcctccgcaactaaagtctcgacacagtcgtgagtgagcacggcatcatcagaatggtaaggtcaaatcaaaaatcaatagattttatcgctaagggacattttagtcgaaacaatacctctcgaggggttctgcggacaatggtgggcttcccgatgcacatatatcctgggtgatttggctaatatctgttttatagcgcacattattgatatcttctcgctggctataaccgacaagcaaattctatcaacatcgggtgcctcgtccatcaaagtgcattccaccatcgacgctgacttcccgctggtgcagtccattgatggtgcccataccattggctgtcaccacatcgtgaccaatgggaatggctcccgtgcaatcaccgctgggtttgatggcgaaatcaaggtctggtcttgtcaggatgggcattgggctgcagacaccaagctgactggtaagaactgcccctctttgataggctacagggtgcaatactaatagcaccacagccgacctcacaaatgccgatgcctgggccatagctatttccgaagatggccaataccttgctggtgtcacgcaagaggggcgcattaatgtatgggatttggctgccgatggcactcggattcgagaccatgagaccaagggcagctttggtacttgcatcgacttggtgagatttcaaatgcagccagatactggcccctgttaaccttgacgtctagtcccccgatggtcggttgatcgcttcaggccacgaagacggcgcagtctatatcttcaccaccgaaacaggccgcatgccattctctctttcaggtaagcgaagttgtctgagccgagcagaaatacaagttctaactcggcctaggtttggtcaatcctgtacgagctgtggctttctcgcctaaaagcaagatcctagcagctgctggcgactccaaggtcattgtgctgtatgacacttcctctggtgaacaaatcgccaatctctcagggcactctgcctggatcttgtccctttcctggagtgatactggcgagtaccttttgagcaggtcagtcaatatcctatgcgtctatacgccggcaagctgacattttcaagttcatttgacggcaaggtcaaggtttggtctatggagaccaagacatgtgtcgctacacactcagaaacagataaagccgtttggaacgccaagtggcttcccaagatcggcaagacagaagggttcgccaccgctggcgcaaaccgcagcattgcattctaccgcgaggctactgggtaaaggagtggctgaacatggggcgttgcagaaatgtccttgcaactgcgttatgacgatttcaatggaacctagaaaaccttactgaactatgcataaaaatcatgaaattcgtattggaacaatgacagtgacccaaacgaccgtgtacttgtgcttatttcatcgcctccacaaacaacttgcgcatccgcttcaagaacgccccaaaatctcggtcatcgttcacgagatctacgacatgctccaaagcatcccggtcaaccttggggcgcgtatggaaaacctcatagtcgcgactggcagtgcccaattcaaaccaagcctccgcctcccaatccttctccaatagatggctatagacaaactttaaccggtcctcacgaccggcgccttcaattctaatacaaaggtaatcctgccagaactccaactccgggaaattgagacgcgattgcgcatctaaatactgtgcgtgagacttctgtgcctcgatcttttgacttatcgccttctgcgtctcggcaatctgttgcttcagacggtcgcgtttggtaaggcgggcatcgcgttctaaggtgatagatgagatagccgcgtgcatttcagccgcttcggctgcttccttttgaagggtttgttcatgggtttgtgatttgaggttgagaatttcgatatcgcgctgtcgcatgcgctcgtcctctggcaggttttgttaggcacagtcgtgggatatggtgggaacgggggtgttcaagtatcaactcataccttcatattcagccatattaatgtgaaactggtttcgttcctctaagactcgtttgcgaccgcgctcaataaatgcgtcgaacttcactgtgaattgtgccatggtattgcggaggtcctcgaacccaaagttgatgctgggcaatgagtctgccattgacggcgcgtccgccgaggcgagtggtgggcgcatgccactcgtggagagcgacggttcgaatgaagaagccatagtattgagaattagattgtgagtagtgtatggtgaagtttgaggttgacgcggggacaatgcgagagttgttttgggttgcggcgcaacaactccgattcttatcgataaggatcaaaaaacttcccggtaccgtctccgcagctctgcatcctgacattatgcgcatatgtatatgaccgggtgaattctgactgctgaaccagtttcgacatggtttcgccaagtcctgaacctgatggatgaacatacaagcagtgctctccactatgggcacgtcggacgagctgtctatcttcctgaggagcaggaatggacgttcactcgttcttttgctaggcgtaggtacttgagcctccttttcttcaaaccagctaacatgttcccaagccccgttgatcaaatataccggtgtgaccaagacaaaaatcccatcgcctttccgctcagccaaagctcgaccaatacccagagtacccgagaaagaccctaggaggttaatcacaagcgcgcatcctgatttggcggcatcgtggtcctccattcgcgctgaacctttgtcgaaagctatcacgactgtagccgaaaaatatgacccggaggtctctgagctttttgatctcggttatgcggtggatcaaaggcgtcatgacaagaggctgcgctcagttgcaattgcggtggctgttaccggagaatgtcgtaatataatctcatttcgaacactggaagaggagattttggagttgacttctccacagaagttagcattccgtgctccatctatcagtgaccaggaaatgtctgaatggtccaagtgtggtgcgccggtacgtcaagtacactttgcacgtcccttggaggagaagcccatgttcctggctgcccgtctccctgcaacgactacaatattccgacctctttaccatttcgaccctgtgcctatgtgcccttcgggggatagtatactgggatcatccacccctttgaaaaactctcggctggatgcgaatccaatcgcggagctatgtgtgtcgcaaacaggtggcttctcacatgcagatgtgacctttaacccctggtatcagagacaattcgccattgtagacaccagaggtaagtggagtgtctgggagatcaccggcagacagcgactccagcaggccacttgggctgccgagcttgtcaaatcaggctcgttgcccatgcaggattataaacgcaaacatggttgccctcgccttgatggctgggcatcaatcgagtgggtccatgatgttggatcgctacttgtctccaatcgtcacaacgtcataatctatgccttcacggatgaccagattccaacacgcacggttgagttgggaatgacaaagccatctgagtgggttctagatgttcaaacaaactcgcgcaagccatcacagtttttcgtcctgacgacaacgagaataatgtggtttgatgtcggagccctaccaggcgagcatgacacaagtctttcactataccctcgagtgtcctggaggcactttcgagaccccgaagacacgaccttgcgacttagcgacatagtcgtataccaaggtatgtgcttgcgcgattgaacacggacttctaatactaagttattatctagatctgtatctcgttctgtattcacagctcacccggctagtacaagtattcccttgtcccttcatatccgatgaagagactgagtccatatctgtacccgatcccctggtgctagatgcgcccctgttggcggatataccgtcaactcaacacgactctgtcgtgcgattctcgagactcgtatttagagaaattgcccactctattgcaccagtgggtaggaatttctacaacgccgacttgccattcatcaagcttttctggatggattccaatcttgccgtccacgaatctactttcgaggccccgcgcggaaacccagacgagccggactcgtttcgcgaaagcagtatcttgcggttaagaaagcgttatgctccgacaatatgcgctggacccaccgatgactttgttgtggatgattgggatgaatcagcgacaaagcaaacgattgttcgtcgttgcaaaccccaaatgggccgcgttgatacaaggtcggacttgcagtggaccctggacttttctggcgtctaccaaatagcgacagggaaaatgaaaatggaaatccatccacaaaagcagacgaagagattaatgcccaaaccaaggacatttgatgcgttaataggggacctccaaatcgaaatggagaatggatcggaccaacctccaggcaaaaccatggttgaattgaccgacaagaaacttctggccgagggtcttgatgaaagagcagatgatctgcaacgactcatttcagcactcgtctctaaacagccgaaccccaacgcgcaatgtcgatatatgtttctaccactcccatcaccgaacggcagttatggcatcccggccaaactctcaggcgaagcagataacgatcttttaaatacatatgatcgaatcgtcgatgattggatgtctaccctgcctcgcgccatccccgtgcagacccgactcatgaaagaaaaagtcattcggggggttgctgtcgatctcatcctttcgcgcctagtaaaaatctctacctcattagatagcatcatactggccaagcccacagatcctgtcgaggaccaagcaattgagaaggcaaatgaaaaggccgcgacacagaacaattatctgcaatcgagctacttctcattatcatcatcgcagatccctgcaagccaatcatcaatggccaaaagccaagtctttggatctgaaccagacgcaatgccaatccagcagtccaagtacaccgcagtcccggtcttgagtggtctctcagcgttcaccacattcaagaccccacgtccagcaccacgaaacgtgacaaacctcttagcgcactggtcggtaggaaccaacccggaagactattcatgggagaggatggaagacgaggaaatgcgggagacgagggcacgcacacccaggagcagacggaagaaacgcccacagcctcgtgaccaatccctccctgcgactccggtaattcctatgatccggacatgggacagtcagccactcgcacctccccgactcaacgtcgccagtagtcagcccgcgatggatgatgtgtcgatgacccagatggagcggggagcttttggagcccgaccactcaagaagccgaaacagaagaagaaaagagcagctggattttagaaatggcttatagatcaaataattcaataatacatactctatacttccgcactatatggcctactacaggagacattggctaaccaatcgcgaatatggctcattctcaaagggatgaattatgacaaatgcagatcaccaaggaggacgccgaggtagaataagaagtatataatctccttttctctctttctatttctctctctttatctctctctcagccattcctccttttggtatattcacctgaaaccggaagtccgctgttatccgccaagcatcatcttcccctccttcaacaacaccccgcaccaacacaaatcaaattcccaccatgtctgatcaccagtacaagttcaatgtgaccatgacctgcggcggatgctccggcgccgttgaacgtgtcctcaagaagctggaaggtaagcgacgcgcggcctgtttcatcgttttttgatcctaacacgttggtctttaggcgtcaagaccttcgatgttagcctcgagactcagacggtcaatgtcaccaccgagcctactcttgcctacgacgatgtgctggaaaagattaagaagactggaaagactgtgaacagtggagaggcggatggggagagcaagcaggtttagattctctcaatgctcacggtgtttccggtcttatatataccccttttcgcatgaggcctggaagtcaaactcgcgagcttgcctaagctcgtggtactcaggcccaagactagactcggttgctaggcagtgctaggtcgaacataccaatagcatgcattccaacttcggaaggttttaaggttgctctggaattcctatgactaaatgacccatgacgagaaatgaaatagatagaaaacgaggggaccgcagttcccgattcaaattggtattgagacccatgaggagagaaattctaagaatatgcgcaagggtatcatgaacaacaatgcaatcaatgcaataaatgcaacgaatgcaatacaaagcatctcaaaacaaaggggggatgtggtggtagataggattaataatccacaatcacgaaatgtcttccatcagggaggggatagggtggacgtggttcaactctttgaacatagactgggcgatcctgctccgtagtttgggatgaggaagggtaattggaggatggtctgtatctgggttagtgcggaacttctcggggcataggggaaagttgtgttgttgaagtggttagtttcccaatgaaggcttaccgcaaggagttgaacccgccgctggctggtctttcatggggggacacgtgaggctggagctttcctatgatagagtctgaaaaggtgcgaaggtgatcatgggaaggagtcactcgcggtcctttgggcaatgagccacgttgatccgacgaaacttgagacaaattctttgtgccaaggtagtcaaagtctctaatccgggtggactgagacggttctccaatgggcgtggcctctggtccggcgcgcctggagacgtattcaagtggagggggctcacggtggtcaacatgccggacaaagtcctcggcataaaggttcctgtctgtgtggacgttctctgataaagggcggccactatcaatgcgggtgtgccgcatagcccgcggctctttcggagcacggtccgaacggaaactacgatcaccatggtaaggatgccacggtccggaattggatacggctggagccgctcggaaggtgcgatccccttccgagacaacgatactggtactggaaagcccagcctgagctttaggctcgtatggtccgctgatatgctgtcgacccaagactgaccttgtttctaggccatattgtgcgttggaataagaaagcgagttctggttcctttcccgctggtatcctacaacagggggttgttccactggcagatagtcccgacggaaatgaggtagctccttgggtcggtggtcttggacaagctcaaggcgacgataagggtgtggcgcgaatccttcggaaacgggaagtcccataggccttgcactccacgggtctgggcgggactcggttcgagaacgttcacgacatgtcagacgccttcttttgctcgcgtgttcgctgtcaccttccttttcgatggcatcgggatgatgccctatctctccttgagaataccctggcgtgaccgatcggagggacattttgttggtcatatgtaccaaaggatgcgaagcgtcagtccaccggctttctattggccgggggttttcgattgagggcaagatagagtcctgtgtgtttgaacctggtctgagaagaggggtattgacggagtcagggtaccgtcccactggggtcaatttctggcgattttcctttggtccgctcacaaacacaggtgcgttggtcctgtccgactgaggaggcagtctttcttgtcggaatatgggctccatcctagagggagggacatcctgcgagtggctcatgatcacattcctgggcccagagagttcttctaggatttgtaactcgggtgattccttattagttagtccagttggcctggcgttcatatcataggttgaataattctgttggacatccgagtgaagatagttctcctggatacctacatgtctctgtcggtccattagtggaatagcgagcactggatgtgcttggttatcattactggctgagcctggagcgactcgccgatgaacctcggcgtgttgaggaactatatcctggcgcctagcagcaggtacttccttagtaatgcgttgctcggcatatcgagggctttgcttttcagcgggggcaccggaaaacctcggttcttcggtgccctgtataccctctctatactccttgacagctcgggtccatgctttgtacctgttaaatcctcgacggttgatggtatccgtggctggggctcttgtgacaaatcggaacccaggtggtgcctcctcggatagttcccgtggaagatcctgaccaagagaattcgtattgtccataggctggcatcggatctcatgggcccgagtatcgcttgcaagtatttccacactggtgtcctggtgacctgctgaagcaaccgcatcttcttctgattcactgtcttcgtcgtccgagataacgatcacctcgcggaaaacatcttccagaactgtctggccgttctcatcgtctcctcgccactcaatgacttttgctagagttgtgtgttccacaacccctcttgcttcgtggaaggaagtggttttcaaaaggcgatcgtagtcagtgtagacatgccgaacgtgagcaaccacagcgagttgggctctgcgagccaaaggcaattcggtggcagtcccaacctttttctgacccttttttggatatcaggttttccaatttctcatttctcaaatcaagattgagtatatacgtaccttttgaaaagcagtcttgataatttgattcaaatccttctctggcatgtttggaaagagatccttcaaggcgtcccgtgcttctgtgttgagggtttgttgagaaatttcagattctccccgaatgttgttctctagtttctggatggggaaggtactaggcactgttttaccggtgcttgtgaggtagaaccccagttctgagcaaacagctgccaccacggtactagggaaatgataccctatccgatgaacatgctgggacaggttatgatggcgatggtggggcgtagtcttaaaaataagcagtgttgatgattagcaaccagatggggttctcaccgatactgcgtagatctggagaccctcgtctcgacatcgctccttgcacgttgtagtgagttgtggatttcccgcaggaatgaaggtgtagccgcttggtgcttgcgcttcaaaacagatctgttccatttttttgttaatcatttggtcatgccgaagcagggaatatacgtacaacactccgaagcttcttcttttcttgggtgaccgattccataataaccttgtgtcttctcgctcttctttgcgtagcccggtcggggccatgcctgaccgagccagctctccttatgacgcgggtcatacttgcggttcagcttatcgcagaaccttgcgaagatgaagatttcaacacatcattcacaatatgtattagacgtgtgatatgaacaggtagatggtatgtgcctcgttgcctggatcagggtgaatggcgcgtggtcaagtcaagacagtcgtgttatgcaccgcagtaacgaaaaaagtacgaagtaaagacaccccgcggtcaaccgaaacaggaacaaggcccttgatgcgagccttctgggtcaacttgagcaaaatcgtagggagcaaagagcaagaaataaaaaaaagagaaagaatgagaatatcaagaaggatggagggagagagagagggagagagcgcagataagatggctattgcggcccaagtcacctcctccccctctcccgatcaggctagtcctgcctgaggcttcagcctttccccaactttgaccgtcttttgttcatctcccctccaatgcgaatccaacatttgaactcaccacttcggatctccgttgattccgtctgattccgtctgattgcacatctgccgcatattccagattcgttggctcgtacatgtccaatagatcggccatgaacgcttcaatccaggccatgaaggtggatacacgagctatggtccacgcataccgtcatctctaccgacaggggttgaaagcgattcaatattcgacgcccggtcgccatatgcttctaaagtccctgcgaaaatcctaccgttcctccccttccgaagaatttgatcctgccaaaatcaccaacacactccgctttctcgaacgagctactgaggttgcgggcatggaacacaagattttgaagaaccttttgctagctagatattgggagcaagatcaccttgtgagggagtcccgcgtgtgagtgaccaccaacagaagtggagaagaaagccgctgacttgccctcagtccgcgatccctgggactcggccatgcagagaaccagctacggacaagtgtctttgaccattacaatttgacacttgaccgtttgaatgagagtctagggacatgtctcagatgattcgaaccccgcagttctcgacttctccctcagtgctgatccgacccgctatgccagatcgtgcgtccgttaggcctcagtgcttcccttgggcatgaatccgcaccggcgcgaggcagctcgcccaaaatgggattgcacataccgggtattgccgtgatcaggacaccggtacatatctcaatcgcatcaggattgcgtaggacacgatgacccgtcttgcctctaggtcagcctcgtgcgttgtattttacaatcttatggcatacagcacattatgtcgatggcaatctacacgccttggcattcaatgcaacgtcgtatagccaatcctcgtctccggacttgagactcattggtagatacatagtaggatctgcaggaagacagcattgatgatagtctactggtagaatactttgagcaaattccaacccaaatgatagtctctactccttcccaatattccctggttttcgagtccaaccgtccaactaaaaagtgtgccaatctcctgaggctccagttccagagcatgtgacgatgattcagcaccggaggcggtgcccgtggacgtcacatgtcacgatgtctgctgttccggctccaagtttgggtttgattctgcttgatttcaagcatccaaagcgatttagtgagatgctggtttagagcccttcatgagtggtttcatttcctcattgctgatccaagctggaatactatcccccttaccaccccaaccgaacagtcaaccaaatgacgacgaagctaaattccacctgaacaaaccgacatacccctcgtgtgatagtgaaggccataaattgagtcctctactggaccaagaccacggacagaactcgaattgcggagatgcgggtgcggggtccctgcatagccctcctttcttcacaaccctaccgaaagagatggatggccgaaactcgcaatcggagggcactcgatcagtgacccataacacacccggatccatccaaaacatagatgcgaccgcaggcgcctccattgatcacacacatgaaatcgacgtcaccgtgcagccggacagttcggggaattcactagtttcacatcccagcgaggcgctgagctcgtccaatgagccacaacatgcttcaacaatatccaccagcgagcctcggcaatctctcgacaatgcctttgatccggagggactggcacagtcttctcttccggcggatgatgggatgggagttctaagaagcaagatcattgcaatcagggagttggagctcaccaatgttgaaaaggcgcgcatggttcacggtttgatgacagaaggttaccactcatcccgtgagctccgaagcgcccctggtctaggggtattctcaactccatcaagtccggcgagcttggggctgccaacaagtccgaggactccgagggcctcggagatcaatacttctaggtcgggctcaccatactccgaatcagactctctttacgagacaaccttcaatctcacagctgaagatctgcagcccacctttgtacccaaggtagaaacagaatcaccagaactcgaaactggggacgaagagggtgacacagaagaacaagaagagactagtctggggtgtgtgcattatcaccgcaatgtgaaacttgagtgccacacttgcaaaaaatggtatacctgccgcttctgtcatgatgaagtcgaagatcactctctcgttcgtcgagataccgaaaacatgctttgtatgctatgtgggtatgcacagcctgcagcgcagaactgcagacggtgtggcgagcaaactgcgcagtattattgcgaaatttgcaaactctgggataacgacagcaaaaagagcatctaccattgcagcgactgcggtatatgtcgaattggacagggactaggaaaagatttcttccattgccaggtaagggctccgacagaggttagacgatactggtactaacaacatatagacatgctctgtttgtcttcctatatgtattgagaacacccatcgctgcattgaacggtccacccagtgtgactgtcccatatgtggcgactacatgttcacttctccagaaaccgtcgtcgtcatgcgatgtggccacagtatacaccacaagtgtctctcagagtactccaaaagttccttccgttgtccgctttgtagcaaaactatcaccaacatggaatcgacgttccgaaacctggatcgtaccatcgatagccagcctatgcctgacgagttcaaggataccaaaggccttatttactgcaacgattgcggttcgaagtcggttgtcaaataccattggctcggcttaagatgtgatttgtatgtactcttcgaaaaaaatggtcaacacctgctgatagcatctagatgtgagtcgtacaatacggcccaaattcgcattttgcacggagatatgtccactcaagccgaggaagacttcgggcaagacctgcttcctcggcctcgatcgtcttcatacactgaaaacgatgacccgatctcctcttccctggcagcactaaacgtcaataatacatcagttcctcgttcacggctcagtgcgcctatgtctactgaacccgttagacgattttcatcctacaacattacacgaggccgtgctgtctcgcccgtcgttagcaactactttggactgccgactgagcgtgaatcagagaaaccttcatctattcccttctttgggggaccatctcgtggcgagaatgaggattacggtgcattgaatttcttgagcaagaagcttacataccgatatggactgtttggaggtgagactaaatcaaccgaaagcgtattggaaactgagaatgaagaagacgacgctgagtcttctgactcggctgaatcagatggttctcctggtattggggatgacgacgaggaggaagaggaagatcaagatgaagatcacattcagattttcggtcatcagtgaggccgatccagatttttccaagtgaacccagatgctcgtcgtccaaggaagtgtgacccaacagctatccttgccctctttaattttcccccatcagcccctgcggcgagcaataaacatcgttcagcccttgcccacaatctacccggtccctgggttcgatttcagagacatctctgaaccggtgcccatccctgacaagaccgactcaatatttctgtcctggaatgatagcgccgtcattttctgtacctttacacatgtgatgactacaaatgtccacaactaagtaaagggcacacctcaacgcaactcggggattgttgcttttacacacatcaagcagccggcttcgctgcagcatagcgttcacttctttttccggtttaaagcacactggtatcatgacgcaacgatagcaattttattgaaactctccatcttacttggcctacactagattgctagaaatattatagtcttctactttcactgcgtacttgacgatataaagtatttaaatacctagtagaagtagctatagtaacctaaaaaccacgtagatagtcatttcccttcttacaataaaagccaatcggactaaagtgctataaaccgatagccacctaacataccaagcttccaagctataaataggattgaggaagccctgaagaggcgatggatggttatcgcgcttacctcagcttctggttgcagccacaagattccattgacgatccaggttgtatcagacatgatgttgcctggtttcatcctgtcttgcttattgaaacacctatttagccattgagccgactcatctgacttccttttcctaatttcccgtcctgaaacgaggcacggatccctccactcccccagccgagtgatgcgcatgtatttaactccttgatttcagcccgtctagattgctcctttcttttcttaaaagactggaaatcactcgacaaggatcctataacctagcttacaagtgaaattcttgtgaacaactccaacctcttccaatctcttatcagtactgccccgcggaatctccttcgtcactttatcagcgccgcgtcgcacccgcgtcagccgtactatgatccgtcgcaactccgacatcgagattcagctcccggacgctggtccaacacctctctcacccgattccgtgagcgatctcgatgtggaaatgttctctgaggagctgacacttcccttgagtctcccaccacacatcgcagcccggttcgcccgcaaaagcagcaaagcccgccgttcctccaccgcctcatctcgacgaagctcggtgtcatccttgcactcgcaccattccaacgcgtcctcaaatggctcgctaagtgcggaccatattgctcagcatctccgtcgcacgtccattttggagagccgaaaggcacgactcgctgatcgtgcattgcatgcggagaaagtaaggctgcgagccgctctggctaaagcagccacacgaaattttcagttcgaagagagggcgttagccgcccagcaggcccgcgagcgtctgctcgccgatatcaccgctaagtgcgaaggtcaggtcagacgggccaaaaagaaggccgaggaccagcgggagaagaaagctgccgaacaagctcgcatgcgtctggaaatggcggagaagcttgcggaggcagagaaacggcgcacattatatcagaaaacacaccgccgccagcgtactagcagcttgcccgtcaccgaggagaaaaagatgtcccgggaggtcacaaagtcggttcagcaggatgcggctgcgcggaagatacagcgcgtatggaaaacccacaacgcgaagatggttatgcagcagtttcagtcattgaacctgtctgtggaccgagttcgcgacatgacttttgaagaagttggcgctctcctttctgacagcaatttgctcgacactatgactaaagttctccgactctgcggtctacaggatatggaaggtggggccttgggtgagaggggtgccgtacgcacgttcctcagcagctatctcatcgtcactcacccgcaagaggttctgagcagcaatggagatcaggagcaggatctgattgctaaggcccgggagctgctaatagcctttcatcaggtcacggcgctgctatcgtctggctgttgctctccgtctgtgatcaccgcagatctccagaccttgtgtgaatctcacaacgtgtttttctctgctttccatgcttggaaatcccacgactctagcgtactgattgagatcatggtcgcacagttcgttgaattggaattgatttggcagacggtcaagaatgacaaagctggtggtgccgcagaagactacagactgggtatccgacagaaccaggtccttttgctagcccgcctgaagagacttgcagggcccgagcgacacatggagttgatcagagattcattgaagaaggccaagcgggagaagaagaaggctgcctccaaacaagctatcccccgatctgctgagactgctcctcccaccacggttacgcagagtgtcacatcgcctcttagcgagtcattcaacaacatcgatgccgcagttttccaagagctggataagcagcggacatcaccccacgagagattcaccagaattctcactcctctccctgaaaatcgggagctggtgcatgaacttcttattaacaaagagttcaagatcgaggaagcaccatataccgaaccacgcagacagattatgaagcagatgtgcgatacaatgagacgaggggtggaagctggacacagtaccaactggactgtcgccatggccacagtgatccaagatcgcttgctacgctcactccaacagggaaattccctttatgtgataattagtgaagtcttagatccaaaactggtccagggacagtgcgaggctggcacattctcctatgataatttcttcggcttcatgaacaacatcttaccacgcctatgcgctccttaccgggaccctgtggtcaaggcatacattgaggatacttcaggcgatgctatcgatcggctgtctcggttgatgagcatcattgacctgctgtcactcgaccagacgaattttatgatccagcttgctgcaccccagctcatcgaagaagctccgggttatgagcggcgggcatttgaccgagacgtcacggacgggacagtcaatttggggaaggtccgacggttttggcgcattcatcgcaacataatcgttgatgagatgaagaagcgagacccggaaggcatccagggtgaaccacgcccatcaccaacacgagtctacgcccaaggtcttgccgacaccgttctaagcaatgcgcttgtatccgaagatataattccagagactctgagtctcgatcgccaacgactcgaacggctgcacgccagggcattccaaatcgtcgcaacagcttccatcctgttgacagcaaagaacctactcaagcgagacgcacggtctcaatggaaaccagaagcagaccggattctgtctctggacttcaatgagatcagcgcagagcgagtacagtctatcctcgagtcgacacatccgatgccacccgctgcgagtgcccagctcgcagctacgatcaaacgagtcctcggacccgtggccacagcatgtctcgcagccgcaccccagctcgcggtagtaacttcagagagctctgcctcagatgcatctgtctcctcagcagagtcgcacggagccacaacctccgcggctagcttctcggatccagtgacgaaactcattctctcccgccttcgcagccacgtcctctcgcgtctcagcgcatcgagtgcctccgagcggatacgggctaccaccacggccagtcagatgctcgctggtgcgggtatgccggagtttgttaatgaggttggcaagttggttgaagaattagagaaggtccgcgaggtggattggctttgccacgggtcggtatacgagggtttatacgaagaaggtgctccagcacaatgaaggcgttttagaggggcatgtataatgcagtctatgttttttgtttttgttcttttgttctttcattcttggattttggaggttgggactttggactttggactgggcagactggcagggtatacgactagttcctagagttttgtatggagtaatgagacctttgacttctatatatcctagattattgaaatgttaaacatgtgaaatgtcccatttgatctgaaatttatatacaaccctcctatctaatcagtaacccccacaccatcaaaaatccaacctcaacaccgtatccctccattccattcccctccaatccctccaataccttcaattcccaactaaaacgccaaccaacatgtctccaaatgtcactatcacacacctatccgacctcacacccccctcccaagaacgaacctggctcacagccccgcacccaaccctcccaatagtcgcaacctgcagttcagacaagaccatccgagtctactcccttacaaactttaccctcctctccacaatcaccggcggccacaagcgctccgtccgcacagcagcatggaagccacacatgtcgggggagtccgttctcgcaacgggcagtttcgacgcaacagtcggcatctggcggcggtgggataattacgggcgggaagacggcgccgggatgggaatgaccaatgacaataaccagaccccgacggatacctctgacgccgacagcgcagaccgcgaagaagacgaagaagaatggcgcttcgccgtcctgctcgacggccacgacagcgaagtcaagtccgtatcatggtccgcgtcggggatgctgctggcgacgtgctcgcgcgacaagtcaatttggatctgggaggatctcgacgacggcgataacaacttcgagaccgttgctgtgatgcaggagcacagcggcgatgtgaagtgtgtttcgtggcatccttccgaggagtgtcttgctagcgggagctacgacgacactatccggctgtggcgggaggatctagatgattggggccaggtggcatgcatcaagggacatggggggacagtttggtttttggattgggagggggatgatgcagagaaatggaacgggccgatttccgattccaattctgagtccgagctgagcgctttacaagctcagtggcgttctcagagggcgctttccggcccgcgcctcatctcctgctcggacgaccgcaccgtgcgcgtgtggcggcggcagccgaaggaatcccagcagatgggcgcgttttcttctgccacgacgggcatcccgagtatcattcggcctacggggacagacgaggcttgggaggaggatgccgtgctcccgcatgcgcatgaactgcctgtatatgctgttgcgtggagtaagcggaccggacttgttgcttcgactggtgcggatgggcggattgcgatttatgaagagcgatttgttacaccggagaaggaggaaaagcaggatgatgcggatgctatggatactgcgtctagtgatgtgctacgaacggagtgggtgcttgttggtattcaggatggggcgcatgggatttacgagattaatcatgttgcttgggcgaagagagcagatcggggttctgggggtgaggaggaggtgcttgtctcgacggctgatgatgggagtgtcaaggtttggactgtgacgcggtaattgctttttggaattggcatgtgttgggtctaaatagcttataaacaaaaggcttgatgtatttagagtccagaaaaaggaagaatatataatcaatatgtcacttgagtagtatgatcgcagagatatcagaatgaaaatcatatttagaattaaaccgaagactccagaacaccgtgtgctttatacagatgccaaaaatcattccccttcctgaaaccccttcaaaaaatcacttgttatgaagactggcggttctcaccagtttctggatgcgagacatgaccttcgtcgtcactagcttcgccaacagcgtaatgctcccgctcagggctaggagaatgaagctggtcgagctcactctcatcaaaatcaccagcctcgacatcacgaccagaatgcttgttctggaatctgttgagaatggatgcattgtccgacatatcattatttgagacgcccttgtagccccggcgagtacggcgactgcgccagatgaaaaagccccaagcgatcacaccgataatcacaataacgaggacggcctcgccagacttagcataagcgtgcatctcagtctgtttcagcctctccttctcgttctcctcggcagcggtactgttggcctgtccgccgacagaagtctggggcagcttctcgccgtcgatacgcgaatcggaaggctggccgccaatgctggcgatatcgaccttcatgaagcgatcgagcatgtcgcggctctggcgggggttgtcgaatggaaccatatgactggagttgtagaagagcacgtaggtgaggttacgggcggattggtagatgccagcgggctcgccttcgaaggaccagtcgtggcgcggggcccagacgccaggggaggtttcgaagccgctgccacccatccaatccatgttgtggatcagagtctcggttccgatatggttgcagatgaggtccttgtcgccgctgaagagcaagacgttgatgcccgattcgatcaatcccggaagcaggtgaacagaggggatggagttcttcgcggtgaaggccatgtggaccataccagcgcattctgtccagccggatttctttgctgggttgatgttcagggccttgacgacatccggtcgctggagatacggctcaatgtttttcaggtcagggggccagttcatgccacaggatttggcttcatccttgagacggacatcgtacatgttgtaacattggtgattttcggtggttcgatcgaggaattgttgcaagactagctcgcatgcgccgacatccagtttgttcttcgcgccggcagtctccagcttcgagaggcagacttcgttgagtgcatttatgttgttgtgaaggactgtgcccggtgtgaggaggccttctctctcaacgaacttaaagtatgaagggtactggtctgcaggagagatccaaccattaccgatcagcaaacccttaatcggccactgtgtgcctccgttctctgcaacgcccttgttgcgatcttgaatggcctttgcaatatatggaatgtgctggccggcatacgattcacccgcaaaatatagctataacacagttagagctttaatcaatgtaggggacaaggcaaacgtacgtcatcgttcgcatactcggggaatagctcaaagaacttttccaagaagataatgaagtgagcggccatctcgtcaagctcatggagatagctattggtgttcgcatagctgaaaccggtaccgaccgggttatccacgaagagcaggttggcaaactcatcccacctgccctcgttatacttcaaggtatggtcgtcctgaagtcggtagggcccaacttccatcaatgcgccatccatagagctacatcctgggccaccattcagccaaatgacagtgcgctgtcggttcgcgatatgacgattctggaaatgccaaaagaacaggttgccgttgatggccggatcgacctcgatatgtctaaagtcgtcgtattagaaaagatatacgtccgaagaaatccaacttccaggagactcacccagcatgcatcttcaagaaagggccctccggcgccccgggtaacgagtgcacataataatccgcagccgaactggccgacaccaacgggctcaagagcagcgataatgcggataataacatcgcgacagtaccacccttcacagaagaagggaggaagggtattgagagcatttagcagtccggtgtgggtatcatcagactagaggtttaggtaactagatagtcaagtagagatgtcccgggagggactcgtaggcgcaaatcaacagatcatcgaatccagacgggtcggacggcacaaggggataggagaggagagggtgcacaaagaagtagcaaaacccaaagaaaggagatgttaaggtgttaaggtgttcagagtgtagaatgacggagttcaaaggaagtccacggctggcgtggcctgtggagtattgagtgtaattaccggtcattaccggtggattggacaaagtgcaccgccacttgctgcttgaatcacggtatttattgtattattcgtacgctgcatatttatttgtcaattgggattattaactgcaaatacgtctccttaagatctatatattttgttatgttcacctctaaatcaaaaagtgcacctcatcgccactggttgaccttattatagtttaattttggggatcttcaactagtaaatcagtgtatcacttagaagaaatcaatagacttgtcggcgtccttcttaataagatccaccatcccctgaatagttagcttcttgtttctctcagcaattcaatagtcttacatcaggcatgataggctgctcattggcgtccttgacatagcggaaaggcatttcggtgcgctcatgctcattgatgagcaattccgggtagtcgacatattgaatgtcctcgagtggtactgggcagaatcagcatccagcacatatattgtccagactgtttactttccacactcacccttctcgtgaacaaccaaacgagtaactcgcacggcagtatcggtggtcatctgcttaggccccaatcggcggccgacatatcccttctttctcaactccgaggtgcgatctaccaagtcgtcagtctctcgccgaagtgcatggagaaaaaagtacatacctctaggcgggtcatcacctgcagatgcagttaacagtcaaagggtcagtctgaactcaatctgtacatatcgcggggtaagagaaaaattccataccgaggataccaccgaacaagaagacctcaaaggtatcaccatcctcaggactcaactcggcctcagcggaggggtctagcaagcagaccttttccttgcggtcggcaaagatctcctcgacactgcgctgctcgacctcgagacccttggtggcggctagatctgcgggcatctgcagctcggcgggcacagagctgaggaggaatcgtgccccgcggtcgtgagattcacgcgcaatgcaggcatattcgagcgtggaccatgggcccagctcgggatccagatgctcgactacgaaggttgggcgagtcatggtgggtgtgggagagagacgtcacagaagcggaaaaaatgaagaaatgaagaagttctcaaggttcggttccactgtgggcaggtgacgaggttataattgatttaaccaatgatactattgtatcaagatgagcctggggagggtcatgggaagatttaggatgtagaaggttgttaaatacaatattaatgagtttagtatatgtgcgagcccaccacgaagtgtagtacatgtgcagtaatttatatagcatccaatagtacccagagtaaactagaggtatattctcactataacatatgatttaattgcttcgcgtcgctgcgcaatcataatacacattatacattctattaaaacaaaataatgcgcagttatccagggaggtaaagtcccagaacgtcatctacctacatagccaatagtggccaatggccatctccgatccgtcacctctctgggatttatttaaaaaactatcctattactgctagtctcttctctattatttgttattctttaacctattatttctctataagtcccgtctcaccctctttgccggtcacacatcaacttctccccgccttatctttcccgcttcaatttcccctccacttcaacttctacttcaactttcttcaaccatccatcatgaatccccaccagcagaacaaagtggacatcaacgtaagtacttctattgttattatcatatctttactcacaattccctagtcgttgagcccagaggagcagcgtctgctgcgcctctacggcaagatgcccaccaagaaagacgtcctccagaacaagctcaaggcaagcccaacacagcctaaccccaccaaacaacaccttcctgacatttaattttctatacaggaacgcaaatacttcgattcgggtgactacgctctcagcaaagccggcaaagcctccgacctaggcgtcaccaacatcgggtcacgccacccagtgccggagaacatcccgcacctaatctcaacctcaccaggccacaacaactctgtcagcaatggaagtgtgagctcccagggcgggcagattcccggcagcatcagcggacaccctggctcggtcgggttccaaagccgcagcccgatcaaggaggggggtagctacctacaccgtggtactagtatcagtgagggtgaggcaggctctggtctggcctctgaaccagtgcagagtgagcaggagcttagtgttagcccccctcccgcgagagagggtgttcctatccgtcgataggcgatgacatagtatcttactccactatgggtggctgtggctattctgagaagggcaattgttgcatgcatatcttttgaagggggtctgtgatttcacgttcaaaagcctggcgctatgggaatttctttgtctttttgttgtctttttttcttcttttttttccctttccaaatgtcttttgtgaatgaggggacaggataggggtgcactgcgggacagagcaagagtgagaacagaggcagtgcgtggacttgtgatggtttcaatgatatgactgatgggagtgggaattcactgcccagtcaatcgagcattgcttcgcttttcggtgtcttggctttttatttttctccaattaccatcatttatcaacttatcaccaatctgtggcattcggggtttttcctcttttccttgatctttgctctcctttttcatatctagttcatacgacatgacccttgtttgtgataatttccttgcaccacttcttgatttcattcttgcgagtgataatttgtgtacattgtattcctaatggactatcgtgttatgtgcataacgatacttccattgttttggcttgttatactatccaatttgttcaaaggttataggttatatacatgaaagtcgtttacacattctacggattgtcttactggcgaatctcccattttctcatctacggtagtgtattatatattgtccaacttggatgctctatgtcgtattaggaactcgtctcttgaactagatcatatcaaggatagaggctatataagcaggctgttctcgtacactacatagaaaatatcgctatatcgctatatagctctattgctgtattcctctatggacagtcaagtatgtcaacatagtggatatttgattcggcataatatactccatatggcacaagtaattaaaaaaagtctaataactggctagatattagcctgtaacattctcatgttctagcgtttctaggccctaaatcagtttagtatagcctaggtagaaagtggtcctccgaccgctagtctagctgtaacacttattaaaaagagatttcctcttttctcatttgaacttctctttcttgtttatttggtttatttgatttagtctattcaattcgattttgtttttttcaggagtttctactttcacttctctccagggctgtcttgcttgacccacgtgaagtgttgtgttgaaagcgataagcttagaggaaaaaaaaaagcaaacagtgtctccccctcaacttctctctcccacatccagctctgaacacgacggttgcttcagatccccccattccttcgatttccttaccgcgtacccaaccctctcggcggtccgatgtggctccttcgagtcttttcgtcggccttgttcctcgccatcaccgtctcctccatcccactagccttcgatgtgggcggcaagacatgtggcctagccttctcactgtccttagcagcattttacttcctggtctcgttgttgaaggtcaccacccctgaccgatcgtggttccgttcctccatcattgccgttctccgctttatacaatgggccgtcatcctggtccttctgatttggtcgctgaatcgattctcggttgatgccgacagtacaggcacaggatgggcggagcgcactttcagcagcaaaagggcgcaggattcttctcttcaggaatggctctttggtcgcgacggcctggtggaaacggtgaccctcggcaactgggatcgacttctgagatggtccaccccggttttccaactggcagagggattctgcagtttgttagtgattcaggccgctggacaaatcacccgctggctcgtcaaccgaggtggacgcagcgatagctggatggtatgttttgatctccccgtgggtgtctcgattaaaaaccaactcttatcctagatcggcctcttggtcttgtccgctacgattatctccagctcagtttacttcctttggcgtgttctgcaattccccgaaatctccaacgtcgatgcggccttgattggagtttccgtcacatgcgccgtcattctgtgtgcctggggtattggaagtggtcgcggtaacccagtcgaaagctccctcctcttcgcctatatcgtgctctgcatctaccagatcttcaccgactaccagccatcgcaccccgtggaacaaatatcctccccttcgcaggtcggagacttccctccactgcctcccatcatcatggcgtcgtacacaaccctgatgcacgcgctgtctcttctgccgtcgattattcacgcaggcttcaacgtcattaccaccgtcttcagtgctgtcacgccctccgtcctcatctcactcgcctaccgcctgctcgtactgtatgcatcgacgcgcatcatcccagctgtccgcgagtcgggggcccgtgccctttcccaggaggcttccattgacgataccgacgcagcaggccaagtgctgggtttcctgagctacttcgcgccgacaattctcatcgctgtctacaccagtctcctcatgcagcactttgcagcaacctcacaagcaatgggtggcagcggtgaatggtggagcacccaaggcaacggcggtggtaacccatggcggtggattaatcttgcttgcacaatatccctatacgcggtcgagctgtggctgggggaaaccaacgatctcgacaacggagtggcaggccactggaaaaccgactgaatgactacttgccagagtcaacgactgctaagtcaacctgcctacgctttccttcttatcattgccccagcaaaagcgcggcaggaaatccaaaggccaatcgaatcggccttcttgcttccttggctgtggtatattactgcacgagcctggtcggccacaagcctaccaagctgacctctcccgcagcaaccttgacaacgaaaacgccactcagcagcgattcaactggaaactcgccatcatcttagctacagctaccgtagaacgagttcttcggaatggtttcgatcgcctgacgccaatcaccggtctcggttcttcgtttcacgtcactccgcccgctcttccttgcttcctcgctaagcattctcaactgccaaacgagtgtatttggttgtctctgtctcgaggcaaacatcactctgttcaacatgccacaacacttttcacgactcgacgataccagataaacctattgctttttcttctttcttctgtgtcttccacacccactttgaattcccactgtttatccgttcggcacttataccctctgctgcctacgctcaactatcccattcacagcttcccggtttctctttcgctcccctcggccgaatcttgctccatctacacgcacgcgcacccactttgactcgaggccattacttgtacataggatacctggttctttcttctattgtatttcttgccaggcgcttggtggggttaatagatattcggttctctttctagatcgaatttgagtgttatagagcggacagttgtagtcttggctgccaccttgggagctgatagtcacatgctagctttcaaccctattaccaagccctacaacccgatatggaatggcagataagaaacctagccagctagagcgcagcaattaatacggaaagcacgtgaatccccactttgaaagggaaaccccatggaactaggccgaattaggaagccttggcactcttaactatggtattatctaagcaaatcaatctgagagcgcaaattacagaggtttacaggtacaaattaatgagctgtgactgttttccctttcattttgaatgctcagattcaataactacttcaaaatggccgaaaacgtagcaaagaagctcaagatctcgtcccccttgattgggacacacaagtgagtgcacctgtaattgctgctcatcctgcccaacctgctcactgatgaaaacagcggtcacttccacgccgacgaggccctcgccgtctacctcctccgcctgctccccacatacgcttcctcccctctcatccgcacgcgcgacccagctgagctagagaaatgccacaccgtcgtcgacgtgggcggcgtgtacgaccccgccattcaccggtatgaccaccaccagcggaccttctcaacaaccttcccgcagcacgccacgaagctctcctccgccggcctggtgtacatgcacttcggcaaggcgatcctcgcccagaagctgtcccttcccgtggagcacgccgacgtagaccttctatacgagaagctgtacacggacttcatcgaagcgattgacgccaacgataacggcatctctgcctacgaccaggccgcgctttccgccgccggtgtcgagaagcgcttcaagaatggcggcatcacgctcgcctcaatggttggcgacatgaacaacccagaccccaccagcccacccggcgagccccaggacgaggacagcctcttcggccgcgccagcacgctcatcggcaacgcgttcgcgcgcaagatgcaccatgcctgcacgtcctggatgcctgcccgcaccaccgtcggcggcgcttacgccgcgcgcaaggacatccacccctctggccgtatcatcgtcctcccgcagggcggcgtgccctggaaggagcacctgtacaacttcgaggctgaggcttcgggaaccaaggagattgaccccgccgtccagacatactatgttttgtaccctgagaacgctaccgagggagccaagtggcgtgtgcagtgcgtttccgtctccgagagcagctttgagtctcgtaagcctctgcctgagtcgtggcgcggtgtccgcgaccaagaccttgatggtgtcatggctgcggaggctgagaagaatggccagagcaagatccccgagggtgcggtctttgttcatgctagtgggttcattggtggtcacaagacgagagagggtgctatggcaatggctgagcgcagccttgagctataggttttggctatttgatgataattaaagtctaaaagaaaaagcgcatatttgatgaaccgttctatattatgatatctcaaggaaactatgatttatttttgacacgaccttttttcttcgcaacgctgggtctttagacgattgtaaataaccaatttggtcttgcatgaaccactggacaccacaagtgtctgtcggctggagtgccaggaggacctttttaatttggtgtcagagatatattagacgagtcttgatatatctggcgcgtcaaattctgactgccaattaagcccggttgtttctccgtggcaaacgagcgagaagcctcggtattcggagggtgtagaaccaagcccaagagaatgagcctcgagcctttctcagcctatctgtatagcgctccaggcattggagcactttcccaaatgttgaccgaagcgagtgttttgttcctaaagaaggactggcctttcgtgctctaatatgagtccatcggtatagtccgggagtggagcgtctggtaggcctaccgatttggtgaagcaatgactagccctcagtgacgaatgctcaatgcactgatatcttcaatgcttccagtgccatctccggtagtcgacatgtcctttggttcagcctgggtggccaggtcctcgcgttcgcccattgcccgttggatgagcttcgccttcgtagcggcgcctttaagacgctcatccacgtcattgacagcttcctccgtattactcatatccagggtagctggatcgacgagttcaagaagcgtctggagattcctggctagtcgagtgctgtgtgatgggagactgggcatgtctttgcagatagacggatcaagggaaagagtatccgttgtgctatctgcctgcgatgcgggaccttcggacgatttcatgtcgagtctctgtgcccagactaatgccttgccgtacaagcggcccatctcgacaaacttctcgaagcctttctcaacggcgaaaacgctgccttcggtatatccggtagctgccccatccgcggtgcccagctcatacccctcattgtagaattgctcctccaaatcaaggagactatctaggagattgggctccatggtggggatagtggaggtagatatgagtcagagttgaggatgtcagatcgatcacgttttttttttgatatgcgcggggcatgtgaccacttgcttattttcccgccttgcccctccaacaaagacattctcctcttcaacaccgcaagatgacggatccgatattgcccaaagccggcgagcggaatatcctcgtgacgagcgctttgccatacgtgaacaatgttccccatctgggtaacgtcgtgggctctgtgctgagtgccgatgtatttgctaggtatgactcaaccccacacagaatatagaattgcgccatgaaactgactgccactcaacagataccacaaggcctgtggccaccgcacattgtacatctgcggtacagatgaatacggaaccgcaaccgagaccaaggcgctggaggaaaaggtgtcgccggaggagctgtgcgccaaatacaacaagatccaccaagatgtgtacaaatggttcaacatcggcttcgaccacttcggtcgcacgcccacggagaagcacaccgagatcgcgcagtcaatcttcatgcgcctgcacgagaacggcttcctcgctgaacgcaccgccgaacagcccttctgcgagcagcacaactcgttccttgctgatcgtttcgtggagggtgaatgcccccgctgccactacgacgatgcccgcggagaccagtgcgacaagtgtggccatctcctcgacccctttgatctcatcaacccccgctgcaagatcgacggtgctgcccccgtccgccgcgagacgaaacacatccacctcctgctcgacaagctccaaccggatatcgaaaaatgggcccaccctgctattgaaaagggtaactggcccaggaattcgcgcgttattaccgagtcctggttgaaggagggcttgaagggccgtggtatcaccagagacttgaagtggggtgttcccgtcccgctggagggatatgagaacaaggttctatacgtgtggtttgaggcttgcatcggctacctttcgatcacagccaactacacagatgagtgggagcagtggtggcgcaacccggaggaggttcagttgtggcagttcctgggcaaggacaacgttcctttccacagcgtgatcttccccggtacacagatcggcacgaaggataagtggacaatgctgcatcaccttagcacaaccgagtacctcaactacgaaggcggcaagttcagcaagtcgcgcggcattggtgtgttcggcacaaacgcccgtgaaaccggtgtcccggccgacgtgtggcgttactacctgctgaagaaccgcccagagactggcgacactcagtttgagtggggacctttcgtggacagcaacaacggcgagcttcttgccaagttaggcaacctggtcaaccgcgtcatcaagcttgtcaccgcctcttacggctccgtcattccagaattcaccgtgccagagtccttcgacccattcctcaaggaagtcaccgaacacctgctccagtaccatgaagaactggaaggtgcgcacctgcgtgccggtgtgcagacagccatgcgcatcgccgaggcgggtaacggactgatccaagcgaaccgactagacaacgcgctgattgcgaacgagcccgagcgtgccgccgccgtcgtcggcacagtgctcaacctgattcttctgctgtccagcgtgttctcgccatacatgccagcaacctcgaagtcgattctggagcagctgaatacacccttcgagtacatccccagtgtggaagagctcaagtccaccggctggaagcctacttcgctgaaggcgggccacaagatcggcaaggcggcttacctgttcacccgtattgatcccaagaaggcggatgagtggcgtgagatgttcggtgggtcacagagcgaccggaagaagaaggaggacgaggctgccaagcaggctgcaaagaaggctgctgctaaggctaagaagaaggagaagaaggagaagggtcgcgctggtgctcccgaaggtgtagaggcgtctgctaagggtggtgcgcagaaggcctccgttacgaccgagggcgaaaatgatgaggcggttgagaagattgctgatggggttgctcaggttactctgcctacctcgtagattgttgggttttcataacatggcgatctggatgataaaatacatgcaaggcgcggtgtgggggcttttctttttatgattatcgatgagatgttgtgcatgggtcatgaacgatgatcatcttctggccatattgaactagcttggggaattcttcttttttataggtatcacgcatggatgcaatgaagatgttttgtttttgatgacctgatcgacgtcttgatgctatatgttccgcctactcgtaactgctcagctctacgatctatctactccgtacagtgagtcacaatccctagtagatccttccaggaaagaaaatagatgggctagcaaaagaattctcatttgcttaatcaaaacacgccggtatggtaagaatttcattacatgctcgttgtagcgatgggatacgaaagtgattagcgagaaaaatccccccatcccacgcaaaaaagaagaagaaaaaaagccgggggccaaatcaacgcttgcgcgtgctcggtctaggctttgtctcatcaggcccgatagggtgcaacatgaccttgttgacagtctgttgggtattggcggagtaacccttgctccagtcgtagctgacggagtaagcgaaaatatttccagtacggttgaaagcggtggtagtgatagggcctccgacagcgggataacccttgagacggtgcttcgcatccttatcccagaagtggaaagtgccgtcggcaccagccgtgctgaatgtaccatggatggggtggaaagagatagcgttaacagagtagatattgcagacatcgcggtttgtaggcggggtttcacggtggcacttgaaggagaagttcgaggcggaatccttctcctcgacgtactgaatagcacagcggccctcgaccgagccgacagcgaagcccgaggcatctgaaaagcagctgactacccgcgtctgccacttgagaggtgattgcatggtcttgtagaactttgttggctgatcgaggttgatgatgttgatgtagcggtctgcggtgccgatgacgagcaatttgttcttgacgtccatggtgtagacacgctcttgacactcgacggaggcaattgcggtggactggcgcaaatcccagtatttgactgtcttgtcccacgagccagtgatcaggagtggggatccgcccacggagggattggggatcatatggcagcttcggatgggagcgtcgtgggcggcaacttgagttgtcgtgcctgaaccgagatcgagcatgcgagctgccttgtcggcaccggcaccgacgaccttggttccatcctataagaagaaaaaagacaatgttagtttctgtgtatgggaactgggctgtgggggaaatacgccgggatggcgagaacgggggtcagcttactggagaccagcagcagttcagaactggagcttcgtgctcgaagagtgcctttccttcactttgcccttggtcgttgatttcgtagatgcggactttcttatcccacgaggccacggccaggtgttcgctagtaggcgagaagcggagatccgagatgccatcctcggggggagtattaagggcgacgtccttagaaatgtcgccggtggtatttgtctggcccgccgaggccgacgacgcgccggcgccgaaaagtgacatttgaaagggcgcgagaggtgtgatatggtaaaggggtatcgagggcgggatgaaaggatgtgagctgaaaacaaagctgaagtcacagctgccaagtcatgcagaagagaaagaaagtccaattcggtagagaaaggaggagacagagaagtcgattgatattgtagctcgccagaaagcgatgcgcgatgatggcagaaaatatatcccaccgccttcgtgcctgtagattttatacttcactcgagggttcttcttttgatcccaattttgtatttgaatttgaatcactctgaacttacatatatatatgtacgcctattctcttaacagaactatagccatgcctatctatccatggatgccatgagtcacgactaccaaggcagcattgccggactgcagttatccgtttggaaaatattttgttagacgatctgattggatgaggctttactcaatggtcgtacttgaggcaactaaaaggataagatttgattcgatcttcactttctaggcattgccgtgtcagtctatacttatcgtatatattaacttgataccgactaggaactatctttaggaagatctataagaagtacttaaactagcgagcgactattcagcttattatactctgctgccgagtcatctttagtaaacaactgtatgcatccataattcacaactattttactaagccaaaaaggacaagaggatatggatatgctggttcacggaccacttatgaattatgaattatgtctttatatctttctagttgttagaaactgtttctgccttgggttgataggacctgctcccaccttgtttgatctccttctctctctcctagcgaacacacaccatacatggggttcctttttcatcactcatccaagagattgttgagattgttgatatatgagtaacatgtctcactatccgacgaatacatgcaatattcaccatgtagatactttggtcaactaggctgcaaatacagtttacaggacattcgagatcggcatgatgaaataatggtcaattaataacgccatagaggaagaaagcttaattacgagcaaccttagaagctcagttgagtttgctggtttgccaccatgttggaatacaaaatggacgtgcattatgccgttaagaatggcctagagtggtcagtttcaccgatgtaggatgatttcaaagtggagatgaaggaatggtatgattgaatttgtagttatagtcaggcgatctcatcatatgattaataaaatctagtcatagagtgtcgtataggtacgtatataagtactaatgtggtagttctagcctaccaccagcacatacgtactcctcttcgtacatataagagtgatctgccctaaataaagtggagccaaatgcggggtgcagcactctgattggctgagagctgatgttgatgtcagttgaaatgatccggggaaggccggtgatattatatttgttttgtagatggtggtagtgaggttgtatagaagagcagagaatagtagagtagagtagagtagagtatagtgtaatatagtatagtgtagtaataatccgtgggagaataatgtgaaacccgctgatacagaggtacttgcttgttatagacaaacaccatataaacagaagtaacatgacatccatgacactgcaccccctctcacacaaccttggtcacctgcctacttcccctctcttcgctccttcttctcttccatctcctgatctttgattcatctcctgattcatctgagagtatattccttatcccatcttgacctttcctgaacttgaccagatacattctgcaaccatgtctgttcctctaaccaaagtcgattctgctatcgctggcttgtctatagccgatgagaagcctgccattaccgagaaggaagtcaagggcaagtctcacaaggagaagcctcacaaggacaagacacacaggcgggcctcatcaacggcagaaggtatctggaatatcaaggaccttggtaagtatccatcaatctcagtaggaaaaccatactgataccgccttagaagagcaaaagctggaactgaccctaccaattgaaacacagaagactgggtggtgggtatctcatctttcctcgcacatagatcagttctcactgacttcggtctaggaaactcaacacctccccatcaactatcgaggacaaggatatcctcaaaatgctcctcgtcactccacccgtcaagaagattgacctccacttcccccttggcctagacgtcaccgctcggaacctcaagggcgtcacaatcaaggacgcattagatgccatctacaaacagttcaagaagaaggtcagtgactctacgatatagaccataaagagtgtatgatgactgacgtgaccccgctaggcggatgacgaacttgacaaaccctacctcgctggcttcgaatgggacaaggaagagtgctggacccggttggtcgtgcatcagaagaaggagggtgcaccacaaccaagcaaaaagtccaagaagaagtccaaggacgaggcatagattggcattagcccatcaacccgggtgtttcatgacatgaacatgaacacagataagtgtccccggatgcccttccaatcccttctgcactttatcccttcacttaccaaccatgataataccgggactattgactcccctcaatctgcaatacgccatttgacttttttgctctgctttttcacagtcccattcggctgctctgtgttcactgcgtttctaatatagaaacaagaactaggagggtacgagggatatttcatattccatctcgtctatcatatttctcttgatcagtcgtttctgcctggcccggcttatgtatctaccctgggtggtgtgccgttcactctttctgacgcctagtggagatcgaatcaaataattttgacaactgtctttttccaatgtagatattgtaagacattatgtagaacccaagttgaggagacaacctgtgattgaagtccaagtggacatgccaagccacactataccggttgacatccacagcttcatatcgacatactatacatgagtatactatagatccatgagaagacggaacagatcctagtcccaaagtgacccccaagacttccgctccctcaaaaaagccttatccgagtacttcggcaccatccccatcctggtatacgccgccttgacattcttcacaacatcacattccaaagtcgaagattccatataataaccccgatctctagcctctcccagacgagtataaaccaccaaatccagatcgcggacgccgaaaatctccaagcccccacgcacccgttcaggaaggaattcctgtccccagaccatctccgtcgcagagtattcatcctgatcccacctgtccccgaagacgagagcttcaaagacgatatccatccgcaagccaccggctgattctttttggtcgtccttcagggagaagattacgaatgtcagctagggttctttgcaagcgggaaaatgatatatagatgtaatgcgaacagatagaaaggtaaatactaggtaactaaatgtatctattacgtgaaaataaagtagagctggacactcaccaacgtttcataaatatacaaatactgtccgccatgcccgacattactccttagtagcgacagtgtatacacgggcggctgctggaccagcatacggcgccagctggcttctggcctgataaatgcatcccatttgcgagggtgcttgaccatatcgaaggtggtgaatgtgagattggaggtcgaggtggaggtgcagggttcatttgtagtgttggtgtcggtatccttcattttaatggtctttccattgctaggaccggattggtggaagattgacgggaaggtctctgctagtagtgggttctgggtctttggtttcttcaatgcattgtcgagaggtcggaagaatagggcccattgtatgggtggcgaggagtcgatgaaattggtccaggcgtggcagattcgggttgcttttgtgaggagggtgcgggtgtccaggttgaggaggattagttcgaagatttcggggatggagagggcgtgagtttgggctgaggttgggggagtggccattgaagtttaagaagaagaggaagaagaagaagaaaatgagctgaagctcagtctgggggattttaggggctctttgttgtcagttgggcacaattgagcctcatcacatgtacacgtgatgatcatttatcttggcgagattatgtggattttggatgtattagatgtgtagatgagcgggcatatttggaattatgtagagacggatgtaatggagtatatacagtggtttaatgaggaagaataaaacattcatttctcatcgagaacggcccgaactcccaaagagaaccaaaacaatctcgtcaagaatcgtaaaaacaagatgggtattaagatgttggttattgagcgtagcaaagatgcgacgggcagcagcctgtgcattagctctgccgaccacattacccgctaaatctggaatgagggtagccaagaccacagtagcctcggcacgactattgaaacgatctgcggctgaacgcggaggggctttgcgaagcacgccgccgggccagagcgtatcgcgagcgagagcaaggtacttgagaagggactcatcctgtaccaggccgcgtgctccctcgcggaccttgcgctctattgtcccgccgaggagctggtgcagaacaacgacgactgcacggccgcgcagccagttgttgccgcggttcagctcgaaggcttcgaggaagagatcacagatgggcttgatgaatggctcgagctcgcggtcttcgaaggcgtttagttccgcttcggcttcggctgctgtgacgacgtcttcggttgcgacgccggattctgggactatcgtgctgatggcttgctgggtggcggcagatatgaggttttggcctgcggtagatagttggtctaggacgccaaagttgccgaggaagtcatccatgccgtctgcgacggagttgtagatgcgtgtgacaaggtctcttgtttcaccctcgttgtcgcgaacggtttccttacggggtaggatggcacgttcagagaggaatgcacgtagatcgcggctgcggcagacctctggcagaaggaggagtttctgcagataggcttcgagagcgagtcgccgtttgtgaaggaactctttctgtagcttcataacgactcgtcgccggggaaattccaagttccggacggaggggtagcgttggcgtagcttttgatgcagatcatggaactcgctgtatcgtcgtgcaacgacccacgatgcggcgggcatttgctcgccggcatttcttttgacctccaccacgtctgaaataactagttagcctggaacaaactgtgcagtatgaacgtctcttacacattgcaaattcacggccatcgtcctcctctttgcctacgacggtagacttgaggctaacggtcgatcgcccaaataagctgttatcgctttcctggagaatgtactgttgccgctgcatttccttgcggtgcatttcacgctggatgctggccttggacttgcgcaggattctcagttccgcggtgttgtttgtcagttctgctttgcgtgtcaatgcttggactacggagtcctgggctgcaagtttgtcgatatctactgagagtgcctcaatcgcctccgttagacccaagtcacctggtgcagcttcgtgcacttcatctgctgggtccttttcatccacgccgtctggttcttcgtattcgtcttcgataaatttctgttgatctggaaataagtcgtcatcaaagaccccaagtcgtgacgcatgatccaccaaaccaagcgatgcgatgcttttcttggttctttcattccggttgtcaaccgaaggagtttcagacaagctgcgcgacgaaggaacaggacggtccgacccgaatagaccagcagcatctcctttgaggtcttcgattctcgcatttttcggctcgttggtaatgatatcattgagtgctgcctccatcgtctcgagaacttggctttggctctggccatcattctcgccattctgcgaatccttgcccaaactatgggtggatgtggccagattgtcagtgtcatagtcgtcatcaaaaagataagcagatcgttctgaatctattgatcgccgtaatgaatcatcatcatcaaataatttccccatgccccgcacatcaccagacgagacagcggctcgtcgaaggtctttggatggtctcaatcccggctgggaactggttctcgacaacaaagggggcagaggtcgcctctcgggagtttcaaaagtgactgctatgggggaggattgccgaactggcgcctgggcagcggatgcttcgtcggacgcaatatacttccagtacagatcagaccccttgaacttcgggtaataagtatcctggagacgctctagaatggcagactgggttgtcaaaaccaccattcgcgcttttcggtattgttccggggtggcgcgctttcctgcactcaggaatgccttgactgctcggcgagactcttcagagacattcagttccggctttgaaaggtaggtttcgctgatgagagctaggtcgtttctgtctgctggcttccatgctaataaagtaggcattggctcatctccaaagtcatcttcaagtgggttgcgcaatccatctacaacaacccagaattgaacaagcgacatcagcttttggcggtccataaactccatgaaataagaaagcccagatgcactgtgcatcacgtcaatcagtgacgattcatgtgttctagatggagcctcaggtcgaatgtctagtgctggaggtacatgggagtcctcgccaggtctcgcaagtttcgccactttctgatcaagaacacgttttcctgtttcaagacgcttcagatagacctgatcctggccctcgaccacactctcctgcttcaattgactggaaacgagggcgcgaaaacgacgggcatcggagaggttattacatttcctaattgccctcacaaagcgctcaaaggctcgctctgaatcggctggtgacagtcgcgggaatggttgcccacgcttagacctaggtgcaggtgacgcatgctggtccagagcggcgcgcagtttgcgtacagtcttccgatcctgcagagctgtacggccatatgcttccattaattggttccatgtgtctgggtccgacaatgaagtgactatcggaataagcacagcgcatgagatgatttcgcgaatcagaaccgacacaattcgactgtttagcacgctttcggggaatagctgtggtagaaggccaaccgctagcttgcgcaggtactcctgttgaacagtcttttgatcggacgccgaggtcgcaacggcaggatgtaagcgaccttcccggtatttgttcgcaatggccagatcaagctctccagactcggtcacatttcgactgagattgcgtccccgaacagaacgctcggcaatgtcaaattctctgaggtgcgatgtcacgataggaaagatacgcgatacgatcagcgacaccatatcctccgcaaccaacctatcccggaggttttcaagagcgacgcgaatcgttcgatcaacttcattggcaaatatagggttcggactgatacttttgtaccacgatgaaacaaagtctcgagtaataaaagacagaagttcgtcgattccttccgacacgacaaaagactggggatagagtggccggggacggtatcgcgtgctccggcggacattcagcacttcctttcgccattggttaggttttatgaaagccaccgaaacgttcttgaggttgactctgtcattctgatgccggattgtgaatgtgacaattcctaaaagacccacagaagctaggacgacgcccagtgtcaaggcatatcctagataccggaggatcggcagccagcgaaccacaagaccccaggcgatgaatacgccgacacccgccagaactaagtcgcggcgactaagggccattctccccacacttttgtcagagttccacggctcataacgatcactcccgggagcttgggagcgaacagctcggcatagtattatggggcctggttggcggggaagctctcgttggtatttagcgtcctggaatggagtcgacgcttggtggggcaaagttcctaggagtcagaagagataaagacgtgtatagcaactgtaaaggcagtatcaatataacagccaagcaaagagtcgagaaagagacgatcccgtgaccgcgcgggagtgaacgtcatttgtgtttacttaagctgttaatccggggccggcgcccatcaacttcgtctttcccctcttcctcttcctcttcttcttatcttcttcttctattctgttctcttcacttttcctgctttaacggttctctgcgccatggcctctcttacggattttgtcgatttttcctctaagcctttactatgtgagttggcctctttacgggatctcaacaatttgcatgtgattgaccccaacagggtccgccgcgactattgctttcaacccaattttctggaagtgagtgtccatcttagtcgagaaaatttcaatcgcaatggttctgcccaggagtaatagctaacctaaattttctagtattgttgctcgcgcaggttggccgactccatccgaggactgttgcgttcgatcttggctaaccggtgaacagagtaccgtaatcacttcttgacccgccttttcggaggcgcaaaaaatggctgctacttccttgcagtcaccatcttctccctcggaattctccgtgaccatgtctaccaactcgctctagctgaccagcccttctacgctcctgttcaccaaccgattgttggaggtgtcttgtttactatcggttccgtcttggttctctccagcatgtgggctcttggtgtgaccggtacctaccttggcgactacttcggtattctcatggacgcccccgtcaccggattccctttcaacgttaccggctcgccgatgtactggggtagcactttgaacttcctcggtgttgcgctgtaccacggcaaggttgctggtattcttttgacggcccaggtatttgtcctgtactggttcgctcttggctgggaagagtaagtggtcattttgaagcatactataactaaactgaccgtatctagccccttcactgctgagatctacgctaagcgtgagcgtgcgcgtgccaagaagcagtaaacgccatggatgtataccaggattggccgggacattcaacatccacaatccgcacaccaaaagagaggccaggttgctcagccaacttgacacccaaagtctgaggttgcccccgacaagtttccagcgcatggacacatccgaatcttcaacgatgctggacctgtagacgatagacctttgccttgtccttgatactatgagtagaacaggacaaggccccacacgctatgatttccctcacgcgactacaaaagatataattcaatccacccatcgcgccaaacctgaattagtaggcctttttgactcacttgtgattgctgaggatgtacaagacgctttccaaattttgtctttccaagcaaaaacgatatctacagcagacaaaagaatgctcgaaacaattgaataaaagtatttaaatctaatattctagaattattttctcagtgttatataacccagtgtcatcgcctcaatttccaatgtgactacacaatgacccagctactagaggacatgtatgaagaccagggttattccaatctttcagaccatattcatatgatcaagtacgctctactttcttcttcactctcggtcaacctgagtcaatatcttgaaccaagcttcagcaaaatccaagcaaagagtcaattgcgcctgctattttcgccaacatgtacctattaatgcatgttcgacttaaccttccacttgcatttgatctcaggcgatgagtgtgggtgagtgaggaacaaatgagaagtcccttcacagcgtcgactccaacgaaaacaacccagttgactatgaagcgaaccatggctacagtcatcaatttgcacacacatcaaatgcgccagacatgaccttcttggcctcttaggaaggactaaaccaagaaactaccgtggaccataccttgccctatgacaaagacatgtccgcagccgcagatgcatggtggttatgatctcaaggttatgggcacacaggacaaggcttgacctttgagattatgggggacgagagcaacaccagtgatgaggacgaagaaaggcaaaatcaagatagcacgtggacactcaccatgcacgtattgtcttctcttcaagtggacttgcgtgccctactgggatggcccatggacattccagttgttatcttttatgtctggataaatgaaagatctcttgtacatccagaaaccacgtttattatagaaatgagggtatataccgacgccacatgaatcaaagagcccaaagagacagagacagggtagtatgtatgggaatagaccaggacatgacaaccagaaggccaaagatcaaaaagaagaagcaaagaagaacagcactgccaacagcccatccctcactgccgccttcccctccccctcttcccctgcgtccgactctcgtcgacagtctcaatctcatcctcatccgttcccttcttcaattcctcaccctcagctagcccccactgctcacggtcataccagtcctcgccatcactcatctcgccaacgtgtccctcagccttacaccattccagaacatcacctttcatgcggcaagatctattcagcgaatcgagcatgtgctccaccccgcgcaccgtctcttcctgcttctggatatacgaccagagcaggcggcgggtttcctcggcttcagcggcaggtaggccgaaatttgggtcggggaggatgttgtccgggacgaggaagagggggtgcggtgttgggagtgggaatgctgagtcggaggagagcggggagccgttttcgttttcgtttgggttgactgcgttggcttgcgcgcgcgttgtcattcgccgtagtggttctggtgagccgtcgtgcatttccaggtcatgttctgtgtcgtcgttgggttcggttgtttcgacgggatcggcatctttcgttgtgtctatgtctggtctcccgttggagggtgattttgtgctcgccccggatgcaccgttgtgattggaagtcgagatgttagggtgaggtggcaggtctttaacggtggcatcggtctcttctgacttaagctgcaagccgttcttggtgggttcaccatctgctgggacctcggccatttccacgtcattttgcgttgaaataacctgggcttttgttccgttctgtgccgactgagggtcctgggtggctgttgatgcaggtgcctttgtggtaatacctgtccgaattgtaccctgctgaccggcatatatgctcggttcgttactagcaagcctggggtcgaagatcaagtgatcgtcaggcgtctcgagcacaccgcatggcatccaactgctatcacctagaaactgcctatgcaaactcctggcgcgccagagcaaagcccgttcctggcgaagcttgtgttcgactgccgctgtcattttctccagggcttgcgacgtgtatgcttgggacatagaaggatggatggggagttcggaaggatgcttcaggggacatagaagagctagaaagaagaaaagaaacagatcagtcatgaagccacagacagtactcaaaaaaagaagtagaaaatcctactctcaagcgcaatcccagagaacgggttgtcttcagcagccgcggcatcagcctcggaatcttcatcatcttcatcaagctcgtcgccctctgaatcatagcgaatcgggttcggctgaagaatgtagcgcgtatagccagcatgatcgattctctaatcaccggtcaaagttaggataccagcttcgtcttatcgccacagcacccaagtcccgaaataggcaaaccacgcacctgcttgtagtaatcttcggcgttgatgtaacccagtgcaccctcgctcacatacttagcattagcttgcattttgttcccccggttcgttggcgccatgatcggatcgtctggaccattatctggggaagaagtatgttagaaaacaatcctgttgaaaagacagactacttagtttgtaactcaccgtcacgttctctgcgcaaggcccgcttcatgcccgtgatggtatcggcgattaacgccgcttgcgccgtcatatttatggtgtcggtaacgaggctgtcgggttagacaagttgatttgcgcgtttgagggggttcctccagtaaaatgaggatgtggcagtgatctcccgagcagggaaaagtaagaggatgagtatctcgacgctggggcctcaattataacgcagggaccaggggaagtgagctgtaatgtctttgagtgactgtgatgaagctctctggcggcaagacatgcggatcgatcgccgctagccgatttaggaaatccgggttatgtgataagggctgaacacgtgacataccctcatctatgcagagtatgaagctgaagatgtttattttatatacaatatttgctcatatgagacaatccaattcatctacggcatgtctctcagatcccagttatatcattcaatcgtcggcatcagcccataccagaacccccttcttgtccgacctcatatcccccgttggaaggacgcggagcgttttgttgaagtaggtatcaataaccaccagctgtggccgaatccataagccacgcttcgctgcaaacagattaaagaccactgtatgacggctcagcggtacaagctgcacaacggtgctcttcggcccgctaaaggcaaattgctcgctagcttccatgaccaggttgaacgtaaggaagtgggtagaggggttctccagtacgtaattcaaatgaatcaaccctgccatattgctggatggggtagccgatgcaaggactcgaggctcgcccatggggacgacaaatcgggggatatcgaggacggtggttgtgaccgagttctctgcgtcgtcggaggacgcagattcagatgaccgccgacgccaattgacctccaatgcacaggtaagcgcagttggtcgacgatctccgagaaggagcttctggatatcgaggcagaagttggattctcgcaattcttctggtgcaatatgggatgtttctggagtgacaagctcttctgagtgtacctcgcaaatagctcccccgttggcttcgaggagtctcagggacatcttgtcaattacaagcggctctagtgcaaaggaaactaccttggaattgaggcaccacttctggaacaggcctccagggcttggcgcagagccatcctcgagtaagttatcgctaactgcgaagaaattgggccatggctgagggtggattgccggcaagaactcatagttcgcttcaaacggccgaatgaatgatagggccacggtgatattcttcataattggtgtctggatatcagacactaaatggtacacagccgaaacctccaacgtgaaatccgtggcctcctgggtatcggccagcacaattgtaagagttttgttagaagagcgctccagaacacccacagctcgtttcaagtaatgagaaggcccctcagttggggtgctggcgcctgagtcagggggttcggaactagaatcgtcgtcaagccactgtatttcagctgtggattcggtaccgaagagtctgatttcagcggatacatctgcagcttcgtcttcttcattgtgtataccgatctgcagcatcaccctttcattggtataataggtagccttcagattgggagtagtgaggcggatcttgggaggcttaggcatgaccttgcatctgccagtatcacgatccttgcccactcttctgcgggtcacgcccttttgcgtctgctgccaccaggacgattcacgctggcctggctcggtgatcgcataacccaaatcgaattgctcttcttcgatcagcatggtgattgaagcaaccttagcttcaccagcttcgcggggaatacaggtaaggttgaagaccttggtctgggagggccccagagtcaaatctgctataccgaccaatgcggtcagtccaccggccggggattgaatcgcggtatcagggttgctcggctcgcgtagtggaagagttgcgatgcaacatggggttgtagtgtcagcatgctgatcctggtcagactgaaccttcactgggcgaagacatccttcgaaaaccagtttgacttctgagagccggataggggccgatgatttatgagcacacgaggtgatggcaagttgggcctgtagaggttccccaacgttaccattggatttctcgaacaccaacgacgcggtcactttgaagacgggggtcagtgtaatctttgaattttgggcttgcaaacttacaactcgttattacatcctctgcacgaaggataagagaaggtttgggcttttctaaaggtaaaccttcaagactcctgtggatgtcataatgccatgcgggtcttggtttgaaagctatcagaatgaatgttaatactgaaaacgataggcacaagataaatggaattaactcacttttattcagcagctcccagtccactcgcaaaactgtctcgctgtcctgaaccctgagggcactttctctgagcgcccatccgaaattgaccatcagatgccaccaccctgagcggcgccagctaagagtagaccacagcggtcgaagaaggccatgcgcttcagaccaggagccaatacgcatatactcctcggccgcctcaagactcaagctctcaactttccttgtttggtggcgtttcgcgaattcctcgatagcagctttcagcgtattcaatattaggcccgagtggtcgaagccagttcttccctcttggggtgcttcagcataagggccgggaacaagatatgtgtcatataagtaggatttgtttgcgagttgtgagccaggtgattgcccagggggcttgcgatcttccaaaggaatcttccgggcaagcgcacgtcgtatcattgtatgcttcgctgaacggtgtagccagtaaccctcgtggtggagattttcccaaggcctgactctttccccggttggaatcgatttctcgggtaaagtatagatgtctccaggttgttcagaagatatttcgctggagatggacggaatttccgctcggcggataagctgtgccattaccatcgaccaacgcgcctcccaggcctcccatccgtagtttttactcccctttcctctgcgattgacaatatcctttacgcgaattctgtgatcaacccaaagccgagctgcggcagtcgtctgtcccgtccataacaaacaacgtataatccgaatggcaagggcgtcggccaggagacgcgcatcgttaaatcgaggattccagcccgcgatattttcgaaaacttcatgtccaaatagagtgtcatacgcgctctcatagttccgacaggctgcatccatttcttgacgaaactcggcaaaaattccaagcttgaattcataccttacgttccagccttgggacgatagggtttgagatgttccagtcgttggcggtgcagtcggaggagggatgctgcccctatttcgtttacgcctggcatgtttagacagatcacgatagtattcaaccaccgacggttgcagtagagagaagagtgatttcacaaaatcttgcagttccgacgaacttgcgtctggtgggatcacaaatatcgacctgggttcaaggtttgttgaccgccgaatccccgcaatgcggtcatcaatctcgccctcatagccaccttcttctccgtcttctgatatcagaacgaccacaaatcgcgtcttgtacccggaggattgccattcctttttcaagctgttgatctcgatcttgagttgattgtctcgtagcgaattcatattcgggtctaacgagaatggaaagaaattgatcactgctgccggaaccagttcttggtgtttagttacccatagaggggtgagcaagccatctgggaaagttggggaacctggcgacaaaggcgatattggcgagtggaggacatagtgcgagctaggttccgggtgttcattgtcctgatcatcgctgggggtggttggtggtgaggggacaggggggtcagcttttcgtggagggagtctgcatgactgtgttggtgttagcaagtagtccgcagtatgatgttgtggaaccaacaggattggaatcataaagtatcaacgtacgcggccagaacttttgatgcggtaaccgatatttgcagtcgtagtattcccgcttacggtaactctggacttccatggcatctgagagctatcttctagaagaagtaggctccggagctcctccgcaacagccccgctcagatgtgggaagtctgaaaagatatgggtccccttctctgatagcagaggatagctcaaggaagttttagtgtcattttcaggccctgcctccagtcctgagagtaggactaaaggcaggttgtgattgacgtagtcttcggggtaggcgtccattgcgggcaatggcagattcgcagcgcggtcaccacatgtctagaggatagagaagagctggggatttaaggagcaagatataaaaatcccggcgattaatgagactaatgctgaaatatgcttcggagtttcaatgatgttttgggtaagataagacaatggctggggaatactgccatgttgccacgggcggtcaattatgtttacacctatcacaaggatagaagttgacctatgtactagttactccatattattgtgacatacgtagattctacacgcccctatatacataggataatgtccgttgggtacggctttcctctctaggctgccgtcgctttaatgagggcgatcaggcttaggtcaacacaggctcaagtgatctggtgcgtgaagtcatgtgatcgctagtcaccgcttactcacccgcctgtctgatttttcggcattcagcttaccgccatttataccgccttagtgttgaactccctagataaattgtcacgatctatgatagatcgctatgatatgctttatgtttacttgctcgcttactgtttgcatcgtttatctcattagataggttgtttgctagatttctaagtgagaaggttcgaggcttgcaacgtttgcaaagggttagctatttgcgtcaatgccactttctggccatcgcaatgctatatcaacaggctgcttcccactgtgcaacttgcttcttctttgtttcttcatcttcgttatctagttgatgtgcactttcttcttcaagatcgacctagcacctcacataaaccacacttatttatcgtattaactacttcatcgtcaacaactaccaccaccactgtgctattagtgatcctactgtgccaatagtgtttactcaactagtcttcaaccacttcaacaactgctccaaacccagatcagttatcgacctttcgccgtcacctccgtctaagccttctcggcaggtaaccaactctgagccaagccttctcggcaggtaaccaactctgagccaagccttcctatcatggatcagcatacggtactgagcgcgggatcaaccggtctcttttgagcgccgaatccaccaaccttctcaacgatgaggcattgccaagtcaatatctacagctaaacacacggtatgtcttttaggcgcctggcacgattacctcttcttcatttccacctatctaactgagcaaagtgaatatggaaagcggtgggaagtgagaagtgactttaagtgttgctcccccacccaactttccttcgaccaatcgcactcattcatcatgaccttggtcttgcaacgggggtatacaattacggctgcgcccatccaccattaacaacccatcttgaagcggcccatatcattccatttatacttggatcctttcatggcaaggcagtggatatatatataaagatttgggttaatctaaggcgctactttccagctcttcgcaatatgtccctttacctcagaacagatcaattcggagaagaacgttctgatgctagattctcaaatttatagggaattcggtcaattcagactcatttttgaagcaaccggaattgctcaccaatatcaaatcaagacctttccagataccgctacagggtcaatacaatttttacctagaacacggaagttcaagagttcacaaaagaagttgggtacttccagatcctaaacttctcaaaattaacgcttgcattggaaaatttctacatatgagtggccaggcggaggtaatcgacaaagtcctgggtaattttgaagtctgtggtgggcttgccccgagtggaagcaccaacatcgaagaccttcttgcactaccctcaaaagccaacgaaacgtccgattcgcagaagtgcagagaagcaacgtcctccggagaagcaaggacgcctacgggtgacatttgctgacactgggaataaaccatgggcatactaaattgcataatcggttatcacggtcgcagttacatgttaggccaggtgatggaccggccactatctttagctaaattcttagttctgaattcatcaacagagagattcagtgatattgttctgctgtccttgttttccgtaacagtcacatggggctctagaataatcatggttgacaattatctgttcgaatatatagatccgagatatatatttgtttactattcttcttcgcgttcaatgttggattcgaatttatagtacctggagcatgcatttctaattgggagctgggtatttacttattcagtacatacagactctgcagtattattctaacatgagttgaccagtatcctcgtatagcctgttaagcctattaagggggtcctccaaaaggagccatttggaatccacgtggaacctcaaatacttagacctccatagctgtgaggaatctaatatatccataaatacacagtgtctgaggtagttattgatattctactccctactccgtagtcccctacttatatatcttctatcggcaaattaagatcctcagtggagaaaaaggcgtcaacgctaatctccaagaaaataagacaactcccttttccttcccttaactccagtctataatatatttttcgctctctcttttcatactcggtataatcgggatcctttctttaatcttcttacgctcactcccaatccctaatttttttggctatcatcaatatctcactgtaagggggggttgacaaggttacaaggaccagaaacccttatcaaacatctttcgcatgcagtagatcatgcgtgtacccattttaccctgcatccgatccttgaagtttgtctgtcttagggattgcacccttagactattgaacaatgtcgaacgagaaccccgtgcaagcagagtcggccctgcttagtcgtcgtcgccgtcgtaaatcgctgccttcgcgcaatggaactgatccaacctcgcctgaagtcatttcttctctcatttcgtccctttccaccatctccgttcctttaaactcgcactttgacaccatcccgaagatcgacgaatcagacccagcgttgccagaagtaccgcgaaccgcgccaattcactcccttcctccgtctgagcaacatgggtttggaatgagttacggtaactacaagtcagcggtagagcaacccgcgctaccggagaatccatttttacaccccgacgatgcggcctcgtcgcctgtcattcgcatggccagggcacccccgtcaccaaagtcgccccgatcgccgagattcaaacccttcaaaacgactgatccatcatccactcgcccggcttcgagagagtcctatacatctgtgataggcgccccagagccttcttcgttcggaacgatcagcacagagcctggaccccgtctgtcaaccccgagcatcgcttcgaatagttctgcagggcgcgcgaaaagcctaaagagtcaatttagtcaattgaaaaggtcatcacgcgaattactctgcgagaaggatccacacgtcgatcgtctgcgaaagactaccagctacaacgacagtctacgacacaacatcccgcgcagccgagcaagcttgcgctcattgcattccatggccgaggttagagaggaggcgcgtcctgcggacgtcaaggaagagccatacgaagcgaaagtcgccagaactccaccaatcaaagattaccaatcgttccacgataccccggatgctggcactcccggcggaattggaagcggtagaatcatcccaactcgcgactcatctctgcgccatcggaatagccagtcatccacctcaaaaaaacaccggtctgcgcatcatagtcgatactcctccacggctagcaaagagcttaatacagacaatgggacaccgggaacgaacaatgacgcagaacaggtgacccgccggatccaagagttgaaagaccagcaacagaagatcaagaccgagttggaagtgggaaacagccctgaacacccgactaagacgagccccgtgaagcaaacaagggcctcgaaggcaaaggcatcgcgcgttctaggatatgatgtcgaccaggccatgcaggaggaaccaggccgcaaccatccatctttcagcgacagtgcgccttctccaaacgtgatgacggggaaaaatcgcaccgggagccggctaggggcaccaatcacaccgaagtctacccacctaccaccgcagtttcccaagtcacccacggaaaacctggattctgagagagctagatacagacagtctctcgaaccaaacacccatcgccgcaccccatccggtcatctgtctcatgtgtcaaatgggcgcccctcgtacagtaccgaacgaccatccagtgccgattcaattgatctcgctgttgaagactacgtattttcgccgaagctgacccagagagtgatccacccaaccactggccgctccattgccttctctgaagttggccatccgaagggccatgttgtgatttgctgtgtcggcatgggtctcacacgatatctgatggcgttttatgatgagttggctcggacgctcaatctacgactggtcacattggaccgtcctggagttggggagagcggtccacaccagggagacgagccgagcacccctctaagctggccaggtaagcaagactgtcgagacattttaatattgcgctaatcaataatagatgatgttgcaatcgtttgcaactaccttcgagtgaccaagttttccatccttgcccattctgccggcgcaatctacgctcttgcaacagctctccgaattccgcagcatattcgtggccgtatccatctcctagccccatggattcccccatcccagttgtctaacctcggttctaagaaggatcctgcgcctaccaacgcggtcccttactcccaaaagattcttcgtgctctccctacatcctttctcaaagtggctaattcaagctttatgagtgccactagtgccagcattactacaagtttgcccaagtccccgcgacggaccaagcgcaaggttactgctacagaagcttccaatgcgaatgccatccctctagtaccgcctataccttctgttgaaaacaaccagcagacccgagtggacattttgccgaatatcaaaccgttcgcttctaccaccgcttcgtacataaagagtgaaacggctctcgggtctcgcgcaaagtctccagaagatgagggcgaacggcagcgtgactatgatactcgtctcacctacaagatctgggagctggccaccaccaacgccaacccggcggttgatttgctgatctgcctcgagcgtcgccaaacaattgggttccgctacgtggacatcacgcgatcagtggtaatccaccatggtagcaaggacccccgcgttccagtggagaatgtccagtggctcggcaagacgatgcgccgctgcgaggtccggatcctcgaaggcgaaggccacggccttatggcatctgctggtgtcatgggcaatgtcttgactgagattgctaaggagtgggaggactggacgatccttgtccaaggcaaacgccgagccactgtcagccatgctgcacggcctggactctcgattcacacttgatctcccttgtctgccatctttccccttttatccggtgtctttgacataacacttcatcttcagccctggtggctcatctttccctaattgccatcgctctcgtttcgacaggctaagccgcagctggtctgcggcttccactgctctgatccacaccttgaaatcctatcttttatccttaccctttcttactcgtctacacacacctactttcgaggttcatgccctctctatgatttactgtcgacatgggttttgcctttgaacaaacgagcccgtctgatttagcataatacccagtcatgccatatactaatcaatattgataattcaacttgacttgtatagtaaaagaaaaaataagacacgaaaacaagcatatattatttacatcatagctccgccaagcaccggggtgaacccgcaaatcagggatgacatacccttgtctccttgaccccacttctcctgacctgtttagagcttttggtcttgtgattgtgagttttggaagattcaagatcgaatgtgcaagtgtcgaatgtccccaatactctaaactgcaagctctgccgggaacggaggaattcttggcttctgaaacacgtcacgttgtctggaagtcagcttggaccctgacgacttggaacattttggatccagcttttttgaaacaatccacaagccacacagctataagcgcaatccgccatgccttcttcccaacggcggcttcgactgatcgtcgttgtggtcatcgcgcttctttttatggtcttttactacaccgtgcgtcaccggatctcccccttccacactgtttcttcagatatctaatacgacgcaatcggatccacagggtgatgcaagcaaaatccaaaaccaaaagttctatcggtcaaccctcgacgcaatgaaagcgaaagagcaagctaagcaggccaaggcccaagagaaaatccagaatcccgtgcatgcgctcggacagaatggcgctgcgggtgcgggtgcgggtgacaaggtgcctgtcgctgcggccgagaaagctgctgttcctcctgctacagggaatgaagatacggaggagataccgattgcggggaggacgaagatgaccgttcccaagaaggtgaatcaggataagccgtcagaggttcagtcggagatcaagagcgaggaggagaaggagcgagaggaaaaagcgaagagagagcgtgaggagaaagagaggaaagaggccgaggcgacaacagagcttaatgccattctcaagcgggctccaggtatgtttctttcccccgttttccatttctggcccgtatccaataccaacaacatccagtcatcgtattctccaaatcctattgcccctacagcaagaaagccaaggtgatcttgctggagcactactctatcgagccgaagccattcgtggtcgaattggatcagcacccgcttgggccgtatctgcaggccctgctcgcacagagcacgggtcgtcgcactgtgccgaatgtgctcgtgagcggaaagagtataggtggtggagacgatattgcggcattggatcagagcgacgagctggcttcgacgctgcgacaaatgggtgggaaatggatcgtggacgtgtcgcaccaggcggttgagaaatcactatgaggttagtattgtaaaacaagtttcaagttttaatagccatagcccatagccatggcagacaattagggggcatattgttgttgcagctcattgcattgtaacagagtagcgaacttgcgcaggaactccaggcagcttaatatttaccacatgtacctctacttgccaagcacccaacttacacctgtggggcaagtactggtacaatcagcgataaggcgataagctgataaggaaccctaatcgcgctagacccaaaatggccctaagcgacgcacaatcccgtgacatccaatttcgctccaccaccaagtccattcgaattttgaacctccccgacatcgacaatctacacccccggcaaccaccaaaagtcacgtcaagatgcggtacattcactccgaggaacggctgcccattctggacaatggtgagcgaatttctttttttattggaggatggaggaagccgatcgcacacaatacaacttctcttttgaggcacgaaattcaaccacaagcctagcacgacacacgatcaacgtccaacaccaatacggcagaagtaggagggaatattgtgtgggatcggcgactcgcacacctaccagacaattctcgattttgattcttcaaaatcttgaattccacaaaaagaaatgccatcaactaacccaaatctcttttcgctctatagtgaaggtccagattaagtcccgcgtcgtgactgtcgagggtccccgcggcaagctcgtcaaggatctctcccacattgccgttaccttcggccgccccgagcagaacgttatctccatcgagctgcaccacggtgcccgcaagggtgttgctaccctccgtaccgtccgtaccatcattaacaacttgatgatcggcgttacccgtggcttcaagtacaagatgcgttacgtctacgctcacttccccatcaacgtcaacatcgagcccaaccccgagactggtcgtgctattgtggagatccggtatggaaccctggaacctacattctttttcgatatgattttggaatcataccgcgaaaaccaaattaagatgaaattagagctaacgttttgttattagcaacttcctcggtgagaagtacgtccgccgcatcactgcccagcccgatgtcgacatcgctccctccgccaacgttaaggatgagctcatcctcaccggtaactccctcgagggtgtgtcccagtccgccgccgacatccagcagatctgccgtgtccgaaacaaggatatccgtaaggtgagttgacaaacaagcatcttttgggaggacccgtggttctgaatctatactaactattcccagttcttggatggtctttacgtgtcggagaagggcaacattattgaagagtaaatgtgccacttgggaatgcatggggtgtccgggagaggtttctttaatttcgcctacttgcatatagggaagcaaagcgaaatgtcaaaaacaaaacgacccttttgaaattcactgattcccttacgcgaaaacgtctttgtatgtggcatgtagaactgtgcgcccgtggcgattctattacttcattactttaatactatgagtattgagtagagagatatatatgtatttgtcgcggggctgtagctgaagatgaagatccgggggaatctggatcgaggtccaactcttcaacctccaacctccaacagaatcccttcctcagaattgagaccattcattttcataatacatctatccttgactacgtataatacttaatcactcaatccaatactattacaccaaattttaatctccaatccctaagcggaacgtgcgtgacgtcgtaacatgtgaaggcgaataccgggcccgcatgtgcacctctgcctccaccagccacaacgcagacatatccctcgaatgaaaatatggggtcctggtggctcggactgtggaatatagttggggcagtctggaatatgctgcttgacgttgctcagttctggagatatgtgagtgttgtgctgcaatcccagtcggagtgtcttatatgcggaggtctgagccggagatagcaaagacaaaagacgcacaagacataaaacatcggatatagtttctgatctgacctcgagctaacatatatatcctagaaactatcatcatggtggcattccaaatcccctcgagatcgactcttctatacgctagccaacgcgaagagctatgaggattgggaagaggcggcatttgagctggacgagctacagagtaaagatttatggtatgagattaaacagagccctgctcaaaatgcaatataccaaactataatctaaccacctacacaggcgccaaaaccccgtcagccgacactacgactaccgactaatcctcggccgactggaagcactgatgagcgcgcgcgagtcagaagacatcctaacactagtaaacctgctccgatcggggctagtgagaaatttgggaaacataaccagcacgaagttgttcacgcacgcgtacgcaggaaccaagcttctaattgacgattacatcacgcaagtagcgctgtcaatccagtacgtgacatccgtaccaggagcgccgatgcatccgagcgggttcagctcccaagcgaagctggagttgctgcacgatacgcggcaggcgtttggacgtacgacgctgctgctgcagggcgggtctgcgtttgggctgtgtcatcttggtgttgtgaaggcgctgcatttgcagggtttgttgccacggattattacgggcactgccagtggggcgatgattgctgcgcttgtggggattcattctgaggatgagttgttgccgttgcttgatggggaggggattgatctttctgcttttgatacgcggaagatgattaatggtggggtcgaggagagctccgactcgggttgggttgggacgttttatcggaggttgaggagattgatgaaaaaggggtatttgtttgatgttggtgttttggaggaatgtgttcgggctaatgttggggatcttacgttcgaagaggcatacgcgagatcgaagcgcattttgaatatcactgtcgtgacgacggggaaaaacgggacaccgaatctgttgaattacttgactgcgcctaatgtggtatgtatttctccccttctcgttgccagtctcagtgatatctaacaccattcctagcttatctggtctgcggcagtagcatccaacgcctcttcctcctcaggcctctactcacccgtgacgatctactgcaaagatgaaacaggcacaatagtcccttggccacacacacaagatgcagtcttccgaccctggcgacacgtccactacaacgaaggcgaatcccccctctcacggatctcggaactcttcaacgtaaaccacttcgtcgtctcccaagctcgaccatacctagtcccgttccttcggtcagaattgaatctcctagaccgacgacagacaggctggagtaatctctcccgttccacaatgcgactaataatggtcgaactgcgccaccggctccgccagctcgactacctaggcgtgctacctgctccggtgagcagaatccttatcgacgagacaatccccgggccaaacctaactctcgtcccggacttgagtttctgggatctaaggaaactgttccagagtccgacgaaagccggcatcgctgactgggcgcttaagggcgagaggggagtttggccggcgattagtgccctgaaggttcgggaggcgattgagattgagcttgatagggggtatcagcttgttaggcggcgtagaccgagtgatccttctgtttcggtggctattccgaagcaggttaacgctatgaatgagggtgttcctaggcgtaggaggggtggtagtgagaatgacgaggggattctcgctgatcgggagtagtattgggttatagggttattttaagtaatgcatattgtttctatatttgtatctgcatgtaaatggtatacttcgtactcggtatacccaacacgcgtagaactatgtagacctcgatacttggtcatattagggtcattgatccatttaattagtaagaatgaactgcaattacaaaattgtatgcatatctgctatccagggctatacatcaatgcctcgtatacaccacaacctctccccattctcaatcaagagcatccgactcaggcggacccttataatctaccaaatgtcagcataaagatctccagcatccagcatcgtccataaaacttacatttcctcgcataaaccacataccaaaccgcagaaatcgccataaacccgacaaaaacaaccgaagcataattcatcgacacagccgtaaccggcaaagcagtcggcatactaaacagcaccaactcaaacgcaatccaagccaacgcaacaacattaacaaacctcccaacaagacctccacaattccacggcgccttcgcaacctcctcccgaccatgccacagactcaaaaagatcggaatagcataagccgccgcgagcgcaataacgcccacagaaacaaacgcggtaaacgcactcgaactcccgagattaatcaacccaagcaacatctgaatggcggtcaacaaaaccaacgcccaaacggggacgccccagcgctcgtcgacgcgcgcccatagtttcgccagcggaacggcgtcgtcccgggcgacggcccaagtcgcgcgcgaggccgcaacggtaatgctaatcgagcagaagactgtaatgaccaggacgagggagatgaggccgagaccgccggcgtgggagcccattacgcgagccagaatgtaggggagggcttggcctgctggggcgttgatgatgtcctggagtgggggcagggttgcgcagatgggaatgatgaagaataggcctgctgtgccgccgacggggacggagagggctattgcgcggggcacttttactgctgggtctgtgcattcttcggccattgaggagatcattcctattgcggagaaggtgtatgcggctggaaggaggccgatgaagaaggtgaagtttccccagccggcgaaggatttgtcgtagtgggctagggtgtaggatgccgagtggcggcctgtgtctgctttgacggagagggcgattaggatgattattattgtgaggagggtccaggatgcgcagagggtgtcgactaaggggaggtggttatttgcaaagatgcagattgctaaggaggtgaggcagactgcgtagaagattaggaggagttgccagtcggatgctgaccaggttggatggtagattgagactgttgctgagagcatggaggcaaagccgaagtttacggagagcgtgatggtccagttgccgatcagccaaatccaggcattgatgaaggagagggttgttttgttgctgcgagagatttggaaggtccagtagtagggccctgccgaggttggatagcgggaggcgagctcggcgagggagaaggcgatacattggtcgaggaggcagacgactatccagccgatgaagattgagaggggaccgccgccgtagatggccgagaggagagctgagccttcgccgtacgggattgctgctatggcgagggtttggaagaggagggttaggacagagcgattgcgacgtagttcttgcttgtagcctagacggtctagttctaggttctcgattgtgccctttccatgatcttggagggagggaggtgaaggggttatctccttctcgatagacatggtgtcagtagcagggttgctagtgagggcagtccgccgttatcagggtctctatagtaggcaaatgaataggaccaagaaggatatacggaggttatatgccgtgcagtcatatgccgaggtgcaacgaatagcatgtcgtgcaagggccgaagtacagatgtaaacaataccatccgaaaggggaatctcgcattctgcaatcgataaagatatacaatttgtggctggtggaataaaacggtaatgggatatgatttaccgattgggagcttcacatacagagaaaagagaatcaagagaaaagggccgacgttcaacattacaaggcaagataagagaaagcttgacgccaggcctaaccctaaaaagcaactatatccagagggcaaagtactccgcatttgatctgcgagattggcttatttgataggcatctacgaagtggataagacaaaatagaaatgcaatagtttcaaggggaaaagaatagaggtatcaaatagaaaaccaccaaaagaaaaacaaagaaaaaacaaacccctaaaaacgtcgaggaatatcaaacattacgaatagtagcatatggtatatacagggaaccccctacatgggaaaagaacaattacagcgctgtcgatggtcgggcctgggacctgcgcgagtgcatactaagccggtgaccggtggccggtggaccctcagtagcgaacagaggggggatactaaatccatatccctcggtagtagcgctacggttctggggatcgatctcaacacggacggaaacgtcgagtccgccaaacatgccgctcgtacaggtgaacccatcagcggcgctgtgtgccgttccggcattgacttcgcccttgtgcagtggtgcatggccgtctttaggaagacgctccagtttcacggaattggattcgaggacaccggtgttaccgggccctggggcgacgacctcggtgaggatggcgtagttgcgggatggcatggtgactttgttccaggcggcgcccttctcctggccgccaggctgcttgtcgaagaaaggcatgagagtctcatcgcattcatggtcgaggtggtggattttgtttctacgagcgaggaggttggcgacggcctggggtgggggcttgtttgtgatagcgctgctgacgacgttgacgatgaagcggtgatcattttcgcctgcaaggttaagtttcgggttggagtagaagcggccgatggcggcaaggtggacgtcgccgccgagaatggttacccgcacgctgttgctgcgggcgaactcctgcaggcggtggactagcatcttgcgctcgtgcttgtgctggcgcgcggtgtagtggtcatccagatcgtcgagtagatccacttggccgtcgaattcattgaagaggccgcctgccaagccgaatcgcttgttcagtagtcggatcggcgcgatcaagggagacgtgaggatgttctcgagccatgctagacgggggtatgcgatcgggacgcctagtaatactatcagatgcttgatgtcgccgtcggcggcgacgatctcgcgctgcagccgttcgaaaatcatatcgtaggtgtcctcgtagttgacctggtgacgggtgcgctctgttcgcgcatctagacctataaaggcaatgcgcttgccaaagcgcatgtagagacttcggctgctctcttccacgtaaggaccgggccgtttgccgatgatccagctgtcgtcctcgacctggttctgcagaacgtaggtattctctacttgacgcgggtcaacacccgaagttccattgacggcatgcatagtctgcggggaatcggtagtgaaagtcgacataggaggggcaatgtggtgctggaagagacagtaatatttgaaagcgacaccgccgataccacggaagacagcacacttcataaaatgatccgtgtatgagccgaacccatcaataatatcatgatcatcccagatattgacctgaggaatgcggccattggcagagcggaatggctcagtgttgtaccagcggacatagttggcatagtagtagtcatcgcaatcagcgcgcatctgattattgaagtcatggttgcgcctcttatgcgggttcgcaatcgcagtccaaggcttgagcgggccatccacacgaacgccgtcattgtaaatctggtcaccaccgccaaccataacgtggaatggcctctcgccatgcaggcgcatcacatcgttccatagatttggccctacccaggcgttcatgtccgtgccgacggaaaagccattgcacgagtggaacatggtacgcatggactgctcttctgcaggaacgacaaattcccacggtgccgggacctggactccggactcgttgtatagaccagggatgtcgtacgcccaacgcgcctcgaatgcggccaccggcacggtaagcgagaatcgccagaaagctttcaggggatcctcgtagagcttgagaccttcgattgtttggtttgttggaaccctgtcggtgccgctctgggcctcaatatccacggcgcctacctggcgcaggcgcagctggggctgctcctgggttggcttggtgacaatcaagatactgccgtgccaggtggttgtagcctggtagtgcatgttcttcaggttgatcaggggaccggatatgagctcgaagcgatcgttcgagccgcgcgtggtctgttgtcccgtctccccattttgaggcatccctgcgattgccgacatgcttcgattagctttgcgcgactttccgattgaggactggggttccgcgacataccgttgacaggctgcgcactgtactcggccataataataatagaaattgatgcgatttggatatcaccggattgtagaggagataaataagaacgtcgactgaagtcgcatagattatcaagattcaaaccacaattgagcgaaatgaagggggggtaaacagggatagaaggaaggaactaggcgtacttgaatgctatagggctactaagtacagggctgaaaaggaaaacaagaaacgaagcgagattggaagctgcagatctgtacctttgggcccgctggcttggcaataaaggaggtcgctgctcaaccccgatgaacagccctgacgctgccaagactttccggtaattacctggccaatgggagaggagattatgctagccactacccggttgagccacctcgcgccacataagtggtttctggctattcctgattgggtcaggagtggtggcggtgcaattttagctttgatcgggttacataagtgggtttcttctgattttgaaggttttttgttcaagagcatcttccatatgatcaaatatgtacttcgttggtactccctacttaccggatgattacacaggcttctactgcttacatgtcagatttctccctatgtatgaccccgctaaatacgtggcctatcacatccgcttactatttactgatctacatgtggagacatccatacttactatactaacaaccatcttgaactttttgtttatttgcaaatttgaaataatatcaacaaactggatcagaacatccctacacataagacacggtcgcgttcgaagatagaacagaggcaaatgatcaacgtagcactcaccaagatctggatccgcagatttaaccgtgaccattgatgcgagtggcctggaacaatcttaacgggacgaggctcatcgttttcagtcccctcagactcatctcgcagcacaaacatattctgtccatggaacaaaccagaagcaacaaccttcttcaactgcttctggcgatattgctccatattgagtccatcacgaacagcaaaccaagtgtcccgggagccagtcgcaagcaattccctcagttcatcctggaaaggcgtataaagctcacgaagctcatcaggctcctcagccagaagctcagcaaagtcatccacaaactgcaagaactgcagggtaacaaccatatccaaaccagcctggaactcgcgcgtaatgaggccgtagtggtgcaggacgccgatttccagaatctcaatctgatgttccatagtatagcgaacaattgcgaggaaacggtctacgggaacgtcaatcacgagctccccttcaccctggttccagaccttccagagatcctcgtagttctcgatcggggcctcgggctcgaagaaataaccctgcaagcggtcggactgtaggtcgaagccgagtaccaacctggcgttgctgaattcgttctgcatgtcgggaacggggaggctcacgaagattactgttgggtttgtgtgggttgggagattgttaaggactggctcgtcatgtagggtgacttgtgtgaagccggtggtttctaggaggtagcactctttcttacgacggagtttgttgcggccactttcgatatgtaaaaggtagatgtagtagtcgaccacaccccatggatggtgcatgtagcggttcaaatgagatgcgaagcatacttcattgggggttgcaggcctgaagattgttgggctgatatccttgagttgggaatcgttggtgaatgggttagacttaggcctcatcaatttagagggaataatgcaggtcatctcatcggcgagctgagagagctgggggctctgcatggctgttataatttcaagccttgattgtcctggttgtcagactagtatctcctcggttgtaggatttgacgaatgagttgattcgagactcacgatggtcgggacaatctacaatgatggctgtgctcggcgagagcctttcacggaggacagaggcgatctccttgatagaatgatgaatagtgaagattaggcacaggagcaggacaaaactcttgagctccaggcgtgcagagaggatatgggagaagagctcggcgaagaactgcttgctgctttcctcgtatatgtagtaataaaggatgtcgaataggtagaaagcgacggctgcttcaaccacctgtatgatacagtgaacaagcacgaaagtcacagatccaaagcacagcacgaacccaaagcacaggagaaacaatatccactcggtatgtgtagaaaggtcctggaagaagttagtaaaggccataataggcgctcgcaatagggggcagcttacaatgtagagtactgtttatgtgcagtgtgttgaagtatgaagctatgggtggcgttgatagtcaattaacttgtgcttctgttaatttgctgtgttgagatggctgtatagaattctgtctcgattcgtagagaggaggtttccttttgtacactggatgaaaaggccgtggacaagtgatatgtgtctccaccgaaagaaaacaagagcacaaaggcatcctaaagatattcttctaaagccctcaaaggaaatctccttcgagatttgacaggagtagaagatacaaagagcataaaggcattcgccgacaaagttcttgtcgggagggttccttttgtcaagtactctatattatttgacttggtatcctaccagtaatgcccttgtttgttctttatcaccgagtatcaaagggaagagaagcccagggagttgtctttgtgaaacacgaatcaagtgtacaaagactcgatccaatatcataagagtagccgcggccggcctttcaatgtataaccggggataagataaagtaccccatatcagccagatcaacgtttaatcagctaggatagcattaggtcttttgtcgagaaatcaagagtgtcacgtagacatagactcggttcagggcctgtaaactcgatcaaagaagagacaaggccattctattctggaaataaagaggctttgttcctagccaagactgagtttcattgtgtattagatgttcgcaatatagataccttatcagtcttacatgccaggcatcacctagcaaatatttccttcaccgggaaccaccagaatctatgtcctcacaagcaaaggccaagtcccccaagtctcattcaatccagcaacccattccaccgaacatgggacaggacagtgtattccttgtgcggtctgattatttagagagttttgacgatgaaccctgggtcgacgtaggttctcagttcttggaggatccggacaacgaggaagctgactgggtcaccgtaattcttcccgaagaaatgaacaagacccatagcgacgaagatatcatgaagtatgtgctacataacatccgaattagacgagccgtcgtgagccaagtggcactgcataatatgggagtgacttgtatttcgatcccgatcccggtcagcactgttgatactgctacaatcttgatttgcgccgaggccgacggaaacaggtggctagaaatgatttctaatggaatggctacgcttcgcagagaggtgatttttgggcgtcggtgatctgtgggctgaatagagagaggttgactgattagctatattgtcgataccagggaggtagccaagtaggaactaaggattgttgtccggcagactctgagaattgtgtctagaatatcaaatcttgtccaaatggtcaaaggtgtcgaagggatcgcagtagctagacgagagttctagtaagtccatccaagtactgaatacctaagtaaccaaataaatcatatacaatcctcaagtaccaagtacctatatgtgccttccttttttgggttccttgttaccccagttccccactgaaaagtattctgattgcatttcattcatagctgtggccatggaataaaccgtaacaaccttggctttcttgctcctcaaagaaattctttgttcgtagttattttgggtaaataatagaatcatagctgtggctttgaaggtcatcatagtcgacagaggatttctccattaattctcttttttaatccaggtgtcctccatataaaaaggcctcggttctctcccgagtgattcgatttggacactattactttcaaccatatacaacaaacaattgttcaaagctcacactgaccaccgacaatatgccacgcgaatatgagccaaatccatttcaatatcactctaggagcagtatacaaggcaagtctctgtttaggtcagccacaacaggcaagttaatagacgactgtgaaagcaacgagacttcatgggtgactgtgagcctccccttcaggatgaattccacccataccgatgaaagactattagaatttgcgattcacgagatccggaggtaccgtgctattgtttaccaaataccgcagcatgcgattaggcatgagtgtatctcgttcgctgtagatatcaatgaggcaggggtgtccctggaacaagtgactcgtgcgtttatggctcaggctgaggttgtcgcgagatactggctgagggagctgcgtgccggtagggtcactcttgaccgagaccgtattttttgtgttgggctttttgatgcacattatgacagggaaacgcgcaactagtatagcattcgatggtctgtaaccaaagaccatgtttagattggaagtatgtactctcgatttcatggaattcaaaatgatattctttctcacatcagtatgacaccgaaattgttatttgaatattcatcagtcacagttgaaatttgtgtagtatcattgtatccctagccccgttagtatgcatgcgatgcgctgaaggagacatcgagggggggattcactacgagcggacccggttgacaggccgtatgttgcacagctgaagacagtagtcatacctgggatatagtagtggcctgtatgtcaattacatttgagtttggaaatgtttggttagaattagatggaggtttagatggttggtaaaactatatatagtacaatgactatgtctctatcaaagaccaaagtcatcggaagaatgaagaaagccattgtaacaatggaaggcctttgttaattctcatacgatactccagatagctcgcatctcaactgtaaccttataagccctcggtgtcctctatctcaccggcatcacccagaaaagcattatcctatcgccaacgaaaaagaacaagaagacctcatcaaggagacagtgagtcctcccagtctcactcaagcccgctaaccaccaagatgtcaagcaaattccagccaagcgtatacaagagcacgaatgggcaatatttcgccgagcccgccggtgaccgaagcgactactactggatcaccgtatatttctccgaaaacatcgatcaccgtgggattccagattcagaaattatgctgtatgtaagggatatgattgaaaagggccgcttcactgtagacgatcagtcaatgcatggtctagggaaaaagtgtctctcgatccctatcaagcgggatccggatacccctctgcctaagtcatggacggcggatcctacacatcccgatctccttcttgctcagaatcttgcagggtattggaaggatcagatcgcgtttaagaaggttactctggatcaacggatgatttttgttgagactcgtcgtaagatagtgagtatagaagatatgttagatgtgggagttactctgatggatccctggcgaatttaaagcgttctttgtctgtgttttcgtgttgaggtccagttcttttgatttggatgtttcagcaatcaatgcaatgcgttttcctgctttgtttatacttgtcacttgatagctgccagaaatggagaaagaagataaaataagatagatctttctttctaattgttactgaaagccattattatgaatgatataatctcttttcataaaggcgaataaaatacccgaagggacagcaagaacaagaccaaacaagagtatacagataacattatacattctgaaagaacagggaggcattataactatgaaaggatttcattctctcattgtacgctgccagaatagccggatcgtccctcagaatataaacctcggcgtcctcgcctggagtaccatcacagtgcatttccacaaaaagagccctcattcactccaatcgccacaatgccttttctacaagcgagtgtgttccagtcaagccagctcgagcatggccaccaattccacttcaaggacccccacaacagccaaccaggttggctctgggggtctgtgactcttccggataccatgggccttggaaccagtgacaaggagattatagtacatatatgtgagaccatcgcagcaggcttggttacttggagcgatagtgcgatgcacggcttgggcaaatactgcatctcgtttccgatcaagttggaaacacccaagcaggacttgaaaaggctgatgattcaggttgagtacgcggcactgtggtgggtgagtttcatccgcgcggagactgtttctattgacaagcacatgcttttccgggcccgtcagccgcccccggatcgtgaggatcaacttttggatgtgcctttccattgggataagcctgactacacggctctgaatccgtggtctgtagtcactgtgctacggtagatcgtggggattgattggtgaagatgactggggtatctgattgggcttggtaggttgatatttcgaatggaacaatgagtgagaagatatagtaacccaagtgaatgagtagtaataatagaatttgccgcaataacgccagtatgatacaactggaacctacagataggttaccaggtctctattgatgagactttagatccaccgtgactgtctcgcccttctctcacgctctttcattttctgcatgagggtatatccacatccggcaccagtcatatacccacctagatgggcagcgtgatccatcttggtcagtcgggagaggggccaagcgcggaataagaacgcgggagctaccaagctgaagacctcggtgccgatcaggcaggtaaggaagacccagccgtatgcccagatctgttcttggagcccttgaggaagaatccacatggtgagtttgtcactaggaggggtcagtataggtactatatagaataacagccagataaatggcgggagacatacttgaagtggaacatgcaccatgcggcgacgataccgctggttgcggcactggctccaagggatgtcatacccaggcggccgaggatgacactgcgtgtcaatgaaaagacagatcccatgatacccgaagcgaaatagatggccaaaaagtttccgcggccgatttcatcgtggactgtagagcagaaaaagttagaatccatattttctagtgcttctccttgtcacaatgcatacctctggtccccataagtcccaggaccatcatattagttccaagatgtctccatgtctgatgactgaaagcgcttccaatcatgccaagtgagctaggatagaagggaacaatcacgaagtaacggttgagcagtttccacgcgggaggtacatatttccatagcaaagtgactgctaagttagctgccacaatggcacccacagtagccacagcaggaggcacatccggcatgaggcgatcctttcgtgctgggaactcatatctctgagcaaaagtatagcaaagagcaagaaccacgagcgagaacagaagcggagcgagtagacgctgagcctgccagttcaaatatggttaacaactaaacaactccacagagtgaaccatccttacattggtgatattcatcgattcagggctctcgttggtagcggcaatatgatgcttctggacccaagcgagatacggcctttcgataggatccgcacggggacgagctaaacatatcagcaccaatacctcacttagactcgaatcttcgtatacataccctcagtgagcgcagcttcctggtactgctgcaaggaaaggttcttcccaaactcccgcttcaaccgttcgtgttcttctttttcgccatcgagccactcctgccttttccgttcctgttcagccagcaagcgcttctcgttcctttcgcgagcctctttcaaaatactcttgccgtaaggagaaccctcctcgccaagctcggcgtcataagaaccgctttgcggcttatacaaacctagcttttcagcgcggcgcatgagtttctcttccgccgcacgatcctcacgttcaatacgggcaaagatagcagcatcctcgtcgacggggtactcatcgcggagccattccaaagcagtatcaaactgctgcttggtgatcgagcgggcaatgtcaactggcaagtccgcatcgagcgtgccagtcagacggtggccgtgtaggacagccaagatacggtttcccagctttgcattgaacttgacggggccaaatatggccttgatctcggcatcagagaagggcttttggcgggggagaacctccgagggatccgatttggccttgggcttgggagatgcggcggacgtacgtttgaagcggcggggggtagagaccaagttgagtcgttggggagatattggggttggagttggtcgggacgggcgagagaatagttgggacagaaggttcggaattggtagcatggattggcgcgatgtactgtacatgcgccatggggcaatgcggagatcgcgactggcaggccggaatgttactggcagcacggaggtgcggagccctgggcatggagcccgccatacggcccagaccacattgctcatatcctgtgactagagcgagggctcagagaggaccatggaatagagggtgatggtggattgttcggggttctttttggcggcatcaatggaccgcacggctgcagagttgttccgagaccgcgattacaacaggtatagagcgaaaagatggagaaatgatagtgagttcttgaatatgctttgttttttaagatattactagtgtgaactatagtatcagatgttctacctaggtatcccatccctaatgcaccactaactagtcaaaatcaatcttaactgacatccatctctgatctataaaacgcacgtgatgataacagataaatgataataaacggccctggagatcatgcatcatgcattgatttcatctctctttcaccactcaccaaagaaacttcaaatgtcgacccaatccctccctatcactccgggcgcctttgccgaagcaattaaagagcttcccctcgcagtcctctacagcaaagtctccgagatcacaaactccatcgcacacctgaagcgatctaatgctgagattcgtgcatacatagcagaaagcaacgattcagaggaagacaagaaggacctggagtgtcatgccactgaaaatgaggccgtgatggtgtccatgaatgagcggatcatgttactgaagaccgaggtcgagaatcgtggacagccttggattgagcttgatgagcttaagaccgacaaggaacaggacactctggcagatgtaccagtgacaaatgggaatgtgactgagactggagctggagctggagctggagctggagctggagctggagctgacggtgcaggagaggagtccaatgatgggggggatcaggatggggtccatctgtgactaattcggtgcgttagttatctgtgtagtcggcttctttaagctggtctggattttgctaatcttcaaaagcattgtcaccagtctgccagtggtactcggttctattatttgcgggcgctttactgcatttgcgtgtgggtcgaagatcggcttatggcaattggctatgtttcactaactagctagtagtgtccattcttcacagtgcatacgatgtgacgcctgaatcatggctaagagacggttatcccaagtacgtttccccaagccttcggaaccgtccgcgtcttctgtagccctatgcaatcgagtcaccaggtctagacaacatggaatacgtctagtgaattgttcacaaccccaagtgtcattatggaattatgatcagatgactttattgcaatgaaaatattaaaaacaagcaatgaccaactgatgctgaatgaagatatgcaagatcatcaagtagaataattcacagcgcatgctaaatcaaagccccggctatgtcatatcattgcaaattcgcccatttttttaaatggcaggagaaagcagaatactaacaaggtaatacagcgcggtccaacgccaggttagcggacatgtcatggtcgtcaaagtaaaaacaaaaaggtgcaactccagaccggtggagcttaagtagcggcctgctgggcccagtggccaccggtgagcgcctctgggggaacccgctgctgcttgatgaacagctcaattaagggctgcataggctccatctccttatcggacacaagcccatagtacttggagacagtcacgaagtgaacgaagcacatgttcaggacatcgtgcttgttaatgtgccaaaaggggttaagccaatgagcgtggtacaaatgggcgtagcagcggaacatctgcttcatgataccctggcagtccttgtaaaaggtttgtgggaagccactggacttgccgatccaatcatctgggttggcggggtcggagggagttgttgatgcgccattggcctctttaatggaagatgtttcaggaatgccatttactttttcggtagggaacataacaggatcatggatcttgctgacgatccatttctcgacgcggttgatgaacttcggcgcggaaattttggcggcgcggccatcaacaagccaggtgtaggtcagcctttgaaatcgtcagccccgtttgaaatttaccccgctatacttcacataccgtccagcggacattgttggacaagtgttctcattgcaaataggtagaccggtcacaccattcacctcctggataacctggagcatgccgtgaagtagacgatattgttcaacaactagagtagagacatattagcatccccgcttccacgttgagcttccatattgcttactctggtgagccagccactcgcccagctccacattcttcgggcaagcacagagggtcaagaagttgcccctcacattcagcggggcatacttctcctggaagaagtatttgggtccctcagggtcgttggcttgagtctccactgacagactactggaaagcgagggcgaatttgacatggtggcttgatgctggggagcagaggcctgtgctgggcttttggggggattgttgctcttgttgcttcctcctcggccaaatccttggcgactgtattcaaagatagagttagcgggcgatcgtggcgaggtacggcagtttgagaatgaagtgggaatatataagaggaagtgtagatgtgaatgacaggagaaggcgccagggaagatattagactttagggaatagaatgctcctttgtatttgtggcgcgccgggggtttcttcgtgcagtatgagggggtaaaggtagcagggagattgaacaacctattgcaacaagtccacgacagcacagcattacttacacgctctggaagaaggtcgccatcttgaaattgatctgcaatgcttcaaatcaagaaaataacaggggatgagggacgagacggtgagatgtccacacgttgaggatccccttttggtctgggccatctagacactagtcctgtttgggtccggggtcggaaaatatatagccccgtgcgtcaattgaattatgagagctccgtcgtaacgatagaacaattgtcaatacaggttgcttactgccagtataatattcaggagtgtcactagtcccttctttaccgtcactcacacttccacacatttatgactttgcaacaacgatagtttccatacaccatgtcctcctccgacgaggccgtccgacgccctagcaatggcaataagagccctgcgcacagcaatgccaatgattctggcgccgaccagatggatgaaggcgatgatctctttggatcggacggagagggtgaactcgatgacattgagtatgcgaaccacaccaaagcgaccagcgctagatactgatatattaccagaccccaccgcaacctggacgacgaacaacttgactccggtgatgatgagaatcgctatgatcggcgcgaagatccaatggaagatgtggcggaggagcagcaggaagtcaatgttgctgaccaggaccttgctcgggctccagtgccgttgaccaacgacggagaggtaggacgagctctaccttgaagctttgatattgatctaacttctggtaacagatctacacaatgcgtgtgccggatttcctctcaattgagggcgaagaattcaaccccgagacttacgtcccaccgccttatcagaccgctgctacctccctatgctggcgtaaagatcctgcggatgagtctcttttacaatccaatgcccgcatcattaaatgggaggatggctccattactcttcaactcgcctccgccccccttgagcaataccgcattgcatctaaacccctcgcacctctcactaaatccggcgactatgaccacaagctggattcccacgtttatctcgcagctggactagaaacagctcaagtcttccgattgacttcacatatcacccaaggtctgactattctcccgaccactttggagacggacgatgccgttcagcgactgcaagaacagttggccgctgctgctcgtggtagcaaacagaccgcagctggcactgcgccgcgctatgaaataacagaggatcccgagttggctggcagacgtgccgaaatgatggaaaaggaagctatcaaggccgagcgtcgtcgccagcagcttgctgatcgtgaggccgaccgcggtcgccgccatggcgctactcgtactggtcctagcggtcttagcgtcggtggtcttgaagatggcggcttgcttacgactcgtccacgtgccaagcctcgccgccaaaaccgccgcggcgagatttacactgatgacgaagaggattaccctcgtggtgctcgtaacaaagaagacgagtacgacgaggacgatggattcttggttggcagcgacgaggagcttgaggaagaagccgaagatgaagaagaggagctggaggatgaagacatggatgccgaaggcgaagatgacgtggagactgcacctgccaaagctgcccgtagcaagccagagcctcaaaccagagctggtacgcctcctgcccgaaagaagaaccgctacgttgtggatgacgaggacgacgagtgagtctgtagcgttctatttttctcctatactcttttcttttcgcgctttcgatgcagttttcttgttacatatccacatggtccggcgtcttctacatggacaggcattcgagggacaatggggctcatttcactctgatttgatgcctgtacaacaaaaattaatgaaatggtcaatgacatatcaagttagcttcgtaccagcgaagcaacgtagatttgtatcatctgatgccgaatggtatatacatatgaaataataactccacataatctcggacatattcgaagtgctctaattagccagatatttcatgcattatgagcccccgtgtgcgctttgttcctcgcagtgacaggctcaacgccctcgggatattctgaaggatcaaagttgaattttttgatcacatccctggcacttccaaccacacgaagacataaaaactccttttcactagaatcctcttgatcttgtgactgagccggctctggtatagacattgagttccactgtcggcttggatgttgcccaggctcatgccagcggcgttgccgattttcgatttccataatcatagacagcagatctggctgctgagaacagacaataatggcacctggctcaacgggaccaccaatgacagcgcgacgaacaacttggtggagccacgatttccaaacttgtgctgggtcagggctttggagtacctcagacacgtactgtggaggcgcggactgcatccccagttcaacagggtcggtttgcgcaacgcgaagccatgagtccgcgacaacggttaatagagttcctataaacatgatattttggaggcccgttgagaagatcttgggacaaacttgacagcggatcacgttccgtgctgttcgtgcagcaatatatagcgagcataaagtgtgggagttgactgggaaggaggaaatggatgtcatgtggctaagggataggtagaggtatgataaacacggacacccagacgctgtggagtcggaggaaactgaggtggcaggagatagcggcgtggaagggaaagctggagggttggggaatggcattggcatggccgtggcttcggagatggccgagaaatcaggccaaggagaagatgatgcgggaacaggaaggtttgactgttttggacggtctggcctacacatatggttgtggtcttcataacctgacaatagatttgcggactggcactgtggcaaattcatgttcgtaccaggccgccagaataactgcggacaaagatgatcggtgtctgggaaggagactgtgtttggactcatccctaatgaagattgttgcaagtcctctgggctgggccaaatttcagttccagatagccctgggaattcgaccccctcatcgtctgttctcgtccttttcttgggtggccggcccatctgtttttgtatggaatagttgcacgagagtgactgtttgatgcatcgcgaacagcctgctggttctccggagcatttgagcttccgttttcctgtcgaacagtaaactggtcagtgagggttatattacatcggcctgtgagacttactacactcgtcgcatgctgcatgtctttttggttctgataaatcattcggggtaggcaaagaagcctctccctcatactcagtcgggagtgacatcttaaaaaatcgaagatcaacagagcccttcaataaaacattctaatgttgggctaggtcatagatagactcgataagatgggggcggtcatgtgggcggtgagcggcgaggcccgagaaattatcctaaaaaaaaaactatggatctaccgcaacaagacaacacccgctgaacggcatcatgaaccccaaggcggcttcaaaaaagcgcaaggctgtcactcgagatgtcgaggaggaagccggtgtcttttccggtgacgaattgagcaaaggcaacctcgatggagccttgtcggacaactctaaggatctttcggacaacgaagacgacgacagcgactcggaagtcgaacttgtcgacgatttcagcgagtcagaagatggagaagaggaattggacagtgatgagatcccctctgatacagaggacatcaagccagctgctggtgaacccaacttccgcattgtgaaggacgccaacggaaacgatcgttacctctgggatgaaattcacccggacgacaattctgaactctccgaggtggatgaaaatgctaacaccattggcgacattccactgaagttctacgacgaatatcctcacattggttatgacatcaatggaaagaagattatgcgtcctgctaagggcgaggccttggatgcgttgttggacagcattgaaatccctaagggctggactggcttgactgaccctaaaaccggcaagcctttgcagctcagccaagaggaattagagttgcttcgcaaggtgcagatgaacgaggttccctccgagggctacgacccatatgagcctttggtggaatggttcaccagcgaacaggagatcatgccactgagcgccgccccggagcctaagcgccgtttcgtaccatccaagcacgagcagaagcgtgtgatgaagctagtgaaggccattcgcgagggccgcattcttccttacaaggcaccagaggatagggaagacaaggaagaggaactcatcaactacgacctgtgggctgatgaagttgagcgacctgaccacgtcatgcacatcccggcgcccaaactccctccccctggttacgaggagagttaccacccgcctgctgagtacctgcccgataacaaggaacgcaaggaatgggagcagacagatcctgaggatcgcgagaaggatttccttcccaaggactttggctccctgcgcagagttcctggatacgacaacttcgtccaggagaagtttgagcgttgcttggatctttaccttgctccacgtgtgcgccgtagcaagctgaacatcgaccccgagagtctcttgcccaagctccccagcccggaggaactcaagcctttccccactgcttgtgccacagtctaccgcggccacaagggccgtgtgcgctctgtcaacgtcgacccaactggtatctggctggccactggtggcgacgacggtactgtccgtgtctgggagctcctgacaggtcgccagttgtggagcgtgaagctcagcgacgatgaggcgatcagcacggtccgctggcgtccgggcaaggacgccgttgtcctcgccgccactgcaggagacgatatcttcctcgccgtgcctccgatcgtcaaccccgaaatcgaaaaggccagtctggatctcctcgacgcaggctggggtttcgccgcttcccgaccggcccctagtgcctcagaggagggcaagaagaacacgcccccgacctggatccgtccctcgtccgctctcgtggacgctggtgtgtgtgtcgtaatccccctccgctacgtgcccaagacgatctcctggcaccgccgcggcgactactttgtgacagtctgctcgggcgcctcgacacccgcctctgtcgcaatctccattcacaccctcagcaagcacttgacacaattccccttccgacgccgcctaaagggtggtggtccccctcagaccgcccacttccacccgtcgaaaccgatcctgttcgtcgccaaccagcgctcgatccgcgcttacgatctctcgcgccagctcctcgtcaagatcctgcagcccggtgcacgctggatctcgtcattcgatatccacccgacctcttcgagtgcatccggcggcgacaacatcattatcggctcatacgatcgtcgtctgctttggcacgatctcgacctctctcagcggccctacaagaccctgcgctaccaccgcaaggctatccgtgccgtcaagttcagcagccgctacccactcttcgcagatgcttccgatgatggatccctgcagatcttccacggcagcgttactggagatatgctcagcaatgctactattgtgccgctcaaggttctcaagggtcacaaaattactggcgagctgggtgtcttggatatcgactggcacccgcgcgaggcgtggattgtcagtgctggtgccgatggaacgtgtcgcttgtggatgtaatcttgagatgccgttgcatgatgtctgacatttttctgggcgtttttctctatttattttttttgtgcataatcttccttttgtatagttatcttacaaaaaagttggtcctataaaaatttctacttagtatcatatcagaacagttaggataatccatcgtggctcagtagcggaagggatatagaattaatgatcatgttcagtcaaatagcaaatgttcaaggtatcttatgtccacaatcccaaggaagaaaaaatgggagaaaaaaagaaaaactctctagatctaaatatgtaaagatgtatatcccaagagaagtacatatacaaatcagcctcaaactcaaaccacaccaccactccaatccctcctgagcttctcatacttcctcaagtccgtaacactaggccgaacaaatgacttagcagcaacaaagtcaacgaacttgatactatcgcgacgcttgatagcagagtaaccagcacgacgcaacaaactgcccaaatcagcaccactgaagccctcacactcctcggcgagtttgcgcagatcctcactaaactcaatagacactttccggagaagagtctgcaagatctcgacacgctcgagtggcgtgggcaggttcacaaagagaagggtctcaagacgacccggacgcagcatagcaggatcaataatatcaggccgattagtcgcagcgatgacgtagataccctggcgactactgccgaggccatcaagctccgtgaggagtgtgttgacaacacgggcggaggcctcagagagcgtatcatcacggcgaggcacaagggcgtcgagctcatcgaagaaaataacacagggcactgaggagcgggcgcggacaaagacctggcgaacagcgcgctcagactcaccgacaaacttgttgagcagttcggggcccttgacactgatgaagttcgcgcgggattcattggcgacagcctttgcgaggagcgttttaccgcaaccgggtggtccccagaggaggacgcccgtcggcgcggtgatgccgactttggcgtagatatcggggtttttgattggctcgacgatggcggtgacaagctcctcgcggatgcagccaagggcaccgatgtcggcccaggttgtatcggggattgtggcgaagccctcgcgcttagaggagggttggatcttggggagagctgtgaagaagtccgcgttggagacgaggacgacttctgtttcatcgccgatgggggtttctttagcgtggataataaggcggcgaagttcgcggactcgcgggctgatatcgtcttcgccttcgatttccatctccatttcttcgccgctgttcgacttgaggatctggagataccgcttgatggcagctgagccggcggtcgagacgagatcgttgagatcggcgcccacgaagccgggggtgcgtttagctagcgtcttgaggtcgatatcgtctgccaaacgcattttgcgggtgagtgcgcgtaggatctgttctctgactggctctgagggcacggtcatgttgatttccttgtcgaaacgaccaccacgacgcagagcggcgtcgaggctgtctgggcggttggttgccgcgagtacgataacgggttttccatctgtcttgtcgagggcaatatcgtccatgcaggtcagtagctgcgcgacgattcgcttttccatctccctctgagcgctctcgcgcttcggcgtaatcgcatcgatctcgtcgatgaaaatgagacaaggagcaagacgcttggcctcttcaaagtactcgcgcagggctttctcggactctcccgacattcctgatacaaccgaaggcgcagagattgagatgaagggcacacccagttccgctgcgaaagcgttcgcaatcaacgtcttaccgcaacctggcggaccatgtagcaatactccgcgcgggggctgcacgtttgatgatagatagacctgcggccgggtcatgggtagaataatcaagtccccaagttcctgaacaacatcatccaatccacccaaatcggcgagactgacatgtgttggtggcgaacgatctgcaggctcagctttgcgtcgcttggacacagattctccgccatgcgttcttctcttggaggagctgggtgccggggtgctagcggcttcggtctttttggccttcgttgttgcccacgagccgacgacgctttggttcattccattgggttcctgatatagcaattccaatcagattttccgtctgattcgagtaaaatatgcgcggtgcatcacttaccgtagcagcaggctcctcgagtccctcaaagtccccctccacggaatcctcatcatcttcacccatatcagctttgataacctccaagactcgctcaagactgtcctcaatgagtctcttcggtttgcgattcaagcttgagtttgatttcttaattgtgtcataaatcgctgggaccgatagtcggatgcgcccagtctcggactggtcgtcgataatcttgcgcacgatctggtagacctgtttttttttttgggtgagtcaaagccacaaagattcattgtatacacacctcacggtccaggccctgactgagggtcggcctgcctcccttcctagcagccatgattcgatatggttgttatgcaaaaaaaaaggccgcgggcccgaaatttcggagattggaattttgaaagatcggttgaaaattacacgtaattacgcgcccgttacataacgtcattcatgtctaggcccgcatctactccgtacatatgggggttctcccttctcttcatcaacatgggaaactcgagtagttcgcagaagatatctgcccaggatcggtgagtgcaacctgctttactttatacatacaatatcaacaacctattctcaatcccgcctcccagggcgttctattattgccctcacgagacccctcatccccacccagcatgcccattcagggaacgcaatagtatgattttagctaaccaaacactccgcggtaactgtagggcaattctcgacctcaagaatcaacgcgacagactgcaacaatatcagcgacgaataaccgtcctcacagaccgcgaaacggaaatcgccaaggaatgtctcgcgcgcaatgatcggcggcgagcactactcgcccttcgccgcaagaaataccaggagtcgctccttgcgaagacagatggtcaactcgcgcagctggagcagttaactgggcaggtggagtttgcgctagtacagaaggacgtgttgttcggattgcaacaggggacgaaggtgctgcagactatcaacaaggagatgggtggcattgaaggtgttgagagattgatgggggagactgaggaggcgagagcttatcaggaggtatgtgcctcgttgtctcttgttcttgttcggttttgctgacggttgtcataggaggtgagtcagatgctggccggtcatttgacgaatcaagatgaggatgaggtcgaggatgagctggaggctctgcagcgggaactttctggtcctgaaatcctgcctgatgatgtcgtactgccgagtccgcctactgctgatctgcccgttgaagagccagtgccagagtcgactcagagaagcaaggctaaggctgagactcggacagctttgcctgcttagtggggagatatgttggatactcgttgcacagcatcaagcattgcattaaattgatccatagcattttttttggcgtttcagcttctttgtttttgttgcctacattgctggtagagttcatgtgttctaaggcgttactggttggctttattgctcgttgtcatactcgtggtctatatattatgacaccatcagtccgaggtttacaaatgatactcaatatatgaacccaattcactggaatgagaatcacataacatcaatgaaatctatgtagaagtacatagtagtagaatggtattgtcgttaatcatgacggacccaagacacaccaggtcatacttccccctcgaacgaagcctatctattgcccaggcataatactgccaccgacaccactaacaccaggaatagagacatgatcctgggggttcgccgcagcctcataaaggaaattaatcggctcccgggttaacttcatgaactgccccttgaagcctacatacccaaccttagtcacatcctcctcgccatcactccaattatcctcaaagaagagcgtaacaaaggtagtcgcattccaatgagcgcggttcaagggtaattcaaagacatcggtgccgggtacaggctgcgggacctcaattgtttgagtcgggtgcaactccgatgcggttgagaaatccatatcgtcgcggttcttgaacagctttattgtctttggggcggagcttgtaggcgctgtgtacaaaaggagggagtggacgttgacctggccgttgaagctatgttatagaagctcggattagtttggggttggcgataacggtgaggggtcaaattagtgggggtgtgtttaggattttcgtgacgcgtcgcaaggggttgaacaaccactataaaatgtaggatagatgtgtgaaatgagcgagactcacgggatggtcatgagcagttgttcgtcggcatcactttcgagctcgggcttgtcgtttagtcgctcggcccaagttttctggacgatggctgtaccagagtttggggttgtctctgtcaagatttaaaaaatcgtcagcaatagttgcctggtgatcacaatggtcatgagtaccattcagggttgtgatcaggtcgaagttgatctgggagtaaaggagggattggatggctggagtgatatcgttggtatggtcgtgatcttcaccgtggcagtggccatcgtggtcatgatggtgccctgacattgcaagatattggtatagatttgatgttgtacaagatgtggataaggcaaagatggatttggatatttgaaggtgaaatgttttggaagctctccactcccgtgacgtcgttttatcccgagggatcacattgttcgaagtgaattgatatttctatgtattaatttacaatgaggtagtatatctgaatatctcactgtacagtacaatggcacaaattgcctctgtcgcttttactgccttggtttccgtcgatctataaaatgcaaccaacacactatatctcaattccacagccccctcaaacgcctgggtattattgtacatgtccctcctctctagctgaattcaaggtgctgttattgcctgactcggtaataatccggagcatactctagcaggtaactcttctcgatcttagtgacatcgcggatgtaagttttgtcacccgtttgcatgatttcgtggaatatgacccagtcggcttttcggttctatattcactttagtaaacccaacatgtactttcccacatgatctatgggtactcacaaacatcaacgaggtggggtgagcatgaagagtcagaccaccgctgacagtcttaaaggttccatctggttgcatcttcgccgcgtgagcaaagtagccagtcgtaagacaccgccgaatctgctccggctgcttgctcaaatcggctgtgccttgacgggatgaaagtgtctcatcgacttgaatgccaaagcgttctaggtaccgtttcaactggcctcggatgctcactgcgcgaagcagtgcccggtaattcaggaggttgtcgcgacaccattttgagtctttcttccctttggtgacaaaggcttggtacacgttgaggtacgtcaaatgatcgccctcttcaacggcgaactttcgccggtgactctcggcagatcttttgtctccagcatgttgaacccacacggtcccctgtaggttgaccatggccgcaattgtaaggatttcacttaaacaattgaaagatggtgcggtgagaagaactttggccatcataggatccagggcaatttctgccatccgtactccaagaggtttcgtgagtttggcatagtcgtcaatcgcaccgagagaggacaagagctcaagtgcacgaataataagttctgccggcggaggggtcaaaaagtcgaaccggacaatgttgtcaatgcccagtgctttaagctgcataatgaccggtgcgagatttgatcgctgaatttcaggtacggttgcctccggcatctgctcaaacgcttgttgcgtgtacagacggaaacatttccctggtttcgttcttccagcgcggccagctcgttgggtggcggatgctttggatattggcactgcagtcagtgtatcaataccagtattggggttgtatgccctgagtttggcaaagccagaatcaatcacatatacaatcccatcgattgtgaccgaggcctcggcaatgttggtggagacaatgacttttcgggtgttttctggagtcggctcgaagacgtacatttgctgttccgttgtaagtccagcatagagtggcagtggaagcagagatggggccttaggatggagagtcgccgctctttcggatatcaactgaattgctgtgtcgatctcttcccggccagtcaaaaagagaagtacatcgccttctggttcttgggtatggatatcaaagacggtcttgactgctcgttctatgtaatcttctgccggagactcaaggaacagcatatcaactggatacattcgtccttccagactgatgatccgaccaatgcttccacccaaatccgccggttctgcctcgggccggtactcgtcgcccgcgaagaaacgaagaaagtcctctgcttggagggttgcactactaacaataatgcgaagttcagggcgcttcttgcggatcttcttcagagttccaagcagcacatcggtactgagagatctttcatgtgcctcatcaaccatgattactgaataccgcgaaagcaggggatcaaccagggcttctctgagaagcatcccatctgtcaagaatttgattcttgttgcaggagatgtcaaatcttcaaatcggatggagtagcccacctcttcgccgactttgcatcgcatctcttcggctacccgcgttgcaactgttgtagcagccacccgtcggggctagaacagagttagtcggtacttattccaaatatgatttgatcagtgctcacctgtgtaacagcaatgatcttcccatcctcacaccatcctgcttggtctaaatattgcggaagctgagttgttttcccactacctgtttggcccaccacaatagtgacggggtatttctcaaccaggtagagcaggttctttttgtgacgtgcgataggtaataaagcagccggtttatacagagctggaatgaaagaggtcgagagctcctgttctgaagccattttagaccgaattttagctgagaacgaactcttctggatttgagcccggttgttaaaagaaaccgaattgggactgggccattctgaggtgtcaagcgctttgcagattggcaacttggagatcgtcggagttctcgcagaaacatccagggcgatctgtataaagcagcccgctatcacgtgcgccccacgtcacttgaagcttccccgatatgttctgctctcagacattctcaggcaacacagtttttgtgaatttcccttcagtcactttcaatactctggcaggtcctgaatatacctcaagatgtcagaggaggaaaagatggtatgtttcaaccgggtatcatttcttatcgcatgaggctcacgttcatacccagaacacttccagcagaccctcagctgcccttggttcctctaacagcccccgagccgagtcaccgaccaccgcgcgcccgatggactttgacgacgagccccaggagaacgggattattacgtccgaccctatcgctactcagccagctgccgccgaggcagccccgccaaagccgccccggcccctgaacccgagagaacagtcggagaacacccttagggaggcatttccaagcatagagcctggcgtcattaaagcggtcctgaccgcaagcaattggaatgtcgagccggcgttcaatgccctcctgggttcgtggggaatctactaagaaatgagtatgagctgaccacgacctcggcttgcaggtatgaccgaccccaaggctcaagaagagatggcacccccgccaaagccgccgcgcccaagccaacagagcactgctgcacagcgacaactggaagccgatgagatgtatgcacgtcaactatctgagcattacaatgcggcaggacgtcgcgcaccacccccgggctgggagagtgatccccgataccagcgacctagaggaagcgaggagtcagaggagagagaatacagcttttttgatggtacgggctatagtggcttgccgaatgggctcgtgctaactggacgtttacagatgatctacctgtgattcgcgagaacctccgcaagggcttcctggagacgcagagtaaggttaactcgtgggtaacaaacctgaagaagcgtattgatggagaggacctggatgaggagcctagccataatcaaagagagactcctgttcatgcccggccccgacgtagtggtgatatgggccgtcgcagtggagatcgtgagcgttacgacgcggaccccaaggttctcggggatgatttctctgctcttgagttaagggatggagaaggtagataacgatctcaagtgtggcatcattgggtcttgctaactgtgcacagctcccccacctcgcccccctcgtccgggccgccccaactctaaaccatccgcatctccttctccagataggcgtaaggtgtctttccaggatggaccgcccgtcgagatcgacaacctttacgatgcttccacgccatccaagcgtctcagctcaacaggcaacaaggcgagcaaatggcagccactgtccaccgttgagccttctcccgtcgcggaaaatgacccattcagccttggcgacagcgatgacgagaaggaaactaagatcaaggagcataccacgggctcggagggcgatcagcccaagcacgtcactgtcgagtcagtctccgacgaagtgggttccacggaccaggagaccaagggcgcgagcaagcccgacgagtcaaaataatcgcgaatgtctggaatttgaatatccccactgttatctgcgcgaagcacttcttgcctttcctcccagcccgtgaccatatttatttcccctgtcgttttactctgccaacttgctctgctatgcgctacccacctccctgattttacgatacctagtagaggtagcccaagacgtttttcaaccttcgaatacctgcataaacccaagccaaattgaatctgtatttgtaccggaaagaaacaaaacaaaagggtatatctccgactggcccgtatagtagcctcaacgccaaaaccaaaacaaaccaacaggcctcgttcaattcactgataggcatcaggcaactcccgaggtctcttacacccacgccgactccccaaaactattactccatggcgggagcattacccacgcgctttgaacctgtctccttgcgcagatccttgatgacagtctgtaaagtagagtcagctgaaagatacctccaaaagccgagtaatgcgcgtagagtgctgttattggtctcgggggaaacgcgtaccgccaaagcatcggggttgaccccgttctcaatgagagacacacaaagtgacagctctgtccggtccaggttggtattctattcaaaatatcagttttatggttacagctttatcttctttttgtaaagaagagagaatgacgacatggattaggcagtcttgaattctgaatcctctctagtttagtccgggataagcacgcaccagcaagtcggagatctcctgaagaatatcgatgacttctctggcagcttggcgcttgtcatcagcctgatcttgagtttttggcggcatattttgttttgaaattgaaggtgggggttgttgaagtgtaaggcggttgaatctgtgtggttggagttgagttgattgtgtgggactctgctgcgggtcaaggcaaatcatcggcgcatacggagtatattgcatggagtactccatacattaacgtgatatttgatattttgataattatctgtattctctaggatacaacattttagttaatctcttaaaatctatgagatattgcgaacactaatattagtagggcattctctattcaattgtcaatagatggcaatctgtacactctcaatcctcgcgataaatgcattgtccatagatgggagaattggactatacgcggccaccttgataactaccactaagatctagtgatcttcccattcgcaccgaaccctaatcacaaccatccccgcccttcttactacccgtagacgttaggactcgggtgagacagaaacagatccaatagggagattgaagaaaatctgatattatggctatttatgtcaaacgaactgtgcaatagagtacctattaggctgatccggctaatcctagggccagtgaatacttttgttgtttttcggcatccggaagttaatgaatacctacatgtatgtaggtttacacccttgtaggggacttttgtttgctatgggttgtgtatagggtttaccatatgtaggtagtagacattctttcacatccttttcgtttccctgtttctctgtatgccttttacatacatttttcttatatttacataatttgagactactttgccttactgtgacagcctaactccatgcaatgggccattatgaagatatatttgatccctaaatagcgttaccctacagaaatgtcctggcatcgccaatatgcctctcgtgagcatgtagctaatgtaggtttgttttgggcatgtctctaggaagaggtgattggagatatcttgacaacattgagatcaacttttaaaactgtatcaaagtaatagattgaatggaggtcaggacggagagctgcatggtcgagaggttgaggtatacatgtgaagcgttacatcctaggacctaagctgagcacacggcaaaccccctagaaggtcatacttcgcctacagtagctgttctttcactagagagaggatttatataacaagcttggaacattctaagaactaggtcatgaaaaacgaggatagagcctcaggccctcgtactacatatgtactatgtagcttgtatgttgtaagcttcaagagaaagctgcatataaataaccattcaatagaagataagatgaaccaaaggtaaatacaaatatcatcaggtgattctatcttcggttttgtatctggagatagctgatatagaaacgtggaccgggaaaaaaaggaaatgcgacaacattggtacgaggcgaacggcgatgcgtactaaatggttaaggtaaatgcgttcagagaacgatgtaatcaaccaaattaaaagtcaagctgtacacaccgtacttcagctcttctcttactcacatttcccacgaacccatctgcagccagccctatcgggttgaggccaaacatcatgcctttcagcgtgactgcattcaatagggacacgggattcgtcatcgtaccatcgacagacccaacagcctggcaacaattccgacaccgaccctgtcttttcctcgcccgcaagctctctgcctggcgaccagccaaccgccccgacctgcctgaaaaacctatcactgtagtctgtattgcaaacgcccacagacagcgaccagtgataccgcatggtgacattctgatctatgctggtgggttggcagcagatggatcgctcaccgaactccaagccacgctggactggctacgatctcagcctcactacactaaaatcgttgtggcgggcagatctgaccggtatcttaacgtattcaagaaggggggtgaccgctggagatatggatatcacaatgcggcacaatggagcgacatcatctatctggaacacgagcatgtcacagtgactgctcagaatggacgccaactccagatttttggaagcccatactcaccaaagactgttccgttcccggccttccagtaccctgagactgataatatttgggaccaaatccctggcagcgtggacattctcatcactcacacaccaccatacacgcaccgcgactctctccaaggatgctggcatttgttggagcggctttggagggatcctccccgactgcatgtttttggctgttctcttgagaattatggctctgaacttttgcattatgatgctcttcaggaggccatggagcgcattgaggctgccggtgggggctttgtcaatcttctgaaggtgctcaaagcgcttgtacagtcctttttccgtcctagcatcaaagctaagactgcgctcgtgaacgcatgcattgaagggggattgtggcatcccggacgccaaccaatcacggttgttatttgacttgggctggaaattggttgcctatgcgcctaggcactttgcgaggatgaggtgactcgatgcgtgatttaccaatgaatgaaccacctgctttaactgtacatgcctagacgcgtagatgaaattgagatattgtcgactcgtagttgtttatagaccaaggggattctcattggtcgaaactcaccggtggggaccacgacacttttcactacactcgatgtttgaactaacttcctacttttacacggcataaactgtcacagttacagtgtcaaatatctggaacaggcgtgctaaaactagtcagccgtggtctggaatggcacctcgatccgaaacgggaggaatgtccggcctcaccatctcggacattcattccttaaagaggaacgaggcactggagattcttgcccaaatttcacgcgtcgagaaaaggaccttccccaccaatgaggcatttccattcggcgaggatttgtggagaaagaagcctaacacgcgagttctgtacgcgattcgagccaagggattgcaatctgatctaattgcctatgcggtctatgtccgacagaagggcgttgcgctcttgcacaaagtctgtgtgacagagcctaaccgccgtcaaggtgtcggccaggaggtgctgtcctacattcagcagcgcctgcgaaaggagggctgccagtatattcaactctgggtggaccaggccagggagcctgcacgcgccttgtatctccgaattggattcgaggagcgtgaggtcatccctgattactatgcccctggacgaacaggtatcaaaatggtcctggacttagaagcgtgatggttgagccactgccgtcaatgctgcactccacgggcctttttccccccactaaaaatgtgccttgccttatcggtccctttgtaatacatcctagggacaataagtcatggtggttggacgcgtctatgctccttggctgctgcaggagccacctatcgctaccccttgcatagacacgggcatcttcgaaacgtgagattatagcgatcgggcctgtgtccattctccgctatcattctgctacatacctccgtgatatctaacatatccaggtatggcttttttcaaagggcacgccttgaatgtctccctggtccctttggtgcgagagggaccgcgatccttttctggaagatcatgcgtgatactcattcatcttcgtcctgaatctctttctttcaatcttgactactttcactatctttcgccgtgagactgggagcatcattggtgattggcgagctagctgtgtactttccagctatatacagttccagtgtgctcgcgttctctcaatcgaccatggcgttctttctcaccatcgtgctggctttcctgtccgtcgccagtgcagcatcactgtctgccaattatcctatcaacgcgcaattgccacctgttgcccgagtttcacagcctttccgatttgaattcgcccaaagtactttctccaacagtgacgcggacactaaatactctctattaaacgcaccatcatggcttgaagtggacagcaccagtctcaccctatccggtacaccgcactcaggcgacagtggcgcgatcactttcaagcttgtggcatcgaatggatcggaaaaagacagcatggacgttactctaatcgtgacagcagaccagggaccgacggtgaacaaaccgcttgtacctcagctgcagaagttgggaccggtctcataccctgccacgctgttcattcaccccggtattccattctcgattgagttcgatccggataccttcaacaacacgcatccctccacgatctactacgggacatcgccaaacaacgccccgctaccttcctgggtcaactttgacccggcagccctgaaatttgttggaaatagccctgcttttccaggcgcggggcctcaaacgtttaccttccagctgatcgcatcagatgtaactggatacagtgcggccaagatgacttttgaactatcgatcggtccccatattctgacattcaacgagactgtccagacttttaaccttacgaggggagaggagttcaacagtcctaatttcactagtcttctctctatggatggttcgccaacttctatcaaaaagctggcaaaagtcgatgctgaactgccgaattggttgaaactggataaggacaatatatcgctgagcgggacgccaccgaataatgctgtgaaccagaatattactattgccgttacagactcttttcaggatcaagcgcagttgatggttcgcctagaattcctcaagctgttcctcgatactgtcgatggctgcgaggccgcgattggccaggagttcaagtttgtgttcaaccagtctattgtcactgatgactctgtacaattggaggtcgatttggacaacgatctcacatggcttacttacttctcggacaacaagactctttacggacacgttccggatgacatggatcctaagaagtataccatccctcttactgcatatcaaggatcgaccaaagacacaatggacttcattctcgatgtgctgagagcctcggacacacactcgaatcccacagatccgtttaccaattctaacagccccaaccacaagaaggctggcatcatagccatctcagttgtggttccattcgtggtgattctgagtctgctgattctcttctgctgctggcgtagtcgcaagagctcagccacggtcgaagaaggtccgtccgacagcaagattcctccgccacgacctgttaggccagatgttcctaattgtcagccatccatggcggaaagaccttctcgtgatgacaattccgaagattggatgagtcctatctccccatcgtcgattcccaagctcgaacttgggcccgcgtggaacgtgtcatcatttgataaacgggagcacccagttaactttactatccctgagcccgttgttccccctcgctctcctgctcgcaactctcccactcgcaactctcccattcgcgggggctttgtcccactacgagaccccatcacccaagaggacaacccagtccaaactgtctcaccttccaggaagcaaaacaatcgcctctcatacaccaacagccctgtgcgtcgtagaaccaccaaccggtcccgacgagagccattgaagccgatccaagcgcgagccgtgaagcgagaatctctccaatcatccaagtccaagagatactcaaagcgctcaagcggtatttcctccattgcctctggactacctgtacgattcagcggagccggccatggtgccggcggcttcggacctcctggacacggcgtggtgcacgcatcgtggcaaaacgcacgagcatcaatgctgagcgatgagactagcctaacaaatatggcgccgattttctcgcgtccgccagcagcaggacgcatgcgccacagcatggcatccagcctccacgacaactacaagcgtatgaccctacgcactgttgagcccgacgactccatcctttccgaagccgactccctcgaagcctttgtccacagccgagccaagcaccgcaactcctccaaccctctcttctccgcgcaaataagccggcgcacttcctcgggcatgcgcgcactcgaccgaaaccgcagcatgcggagtcgtgccgacaccgtctccgtgtcaaccttcagcgacgaattccgccaatccatccaagaacgtcccttatcgactgcgatgtccgcctctgactacggtgacgacagcaacaacaacagccgcttctctcaatatcagaactcccaatttcagaaccagcccggtctgtttccccttgctgagggaagcgtatatggccagagccagttgagtctcgcacaagactaccgcggtgctatctccccgctgccgcggttctggagcgagaatagtctgggcagtgctcggaaattggagggccagggcacctctcagcctcagaaagtgaatgatgaaaatgctatgccgcccagctcgtctatgatctcggatttggacgaacatctgtcccgcaaggtcagccctagcaaggaccctgatcatccgtggtggctgtcgtcgcctcttgagcccccgcggccgccgaagagtgctgataatcggggtcttcctgtagccagcagtggagagctggcatttgtttgatctctgacttcttcgcctatattttccttgtttgatgtctctctatctctctatttgtctttcttttctttctattatcgtttctggcgttatccggcattgcgagcatgatatccattggcttttctatggttgattcgttggtattttggtattttagtgaagtctctatgctagtaaatctagttctagagccaatagtaatatctctgcttcattgtttgatcgttatcgtagtgggccactggggcttttaggatacaccgcttggctttctaacatggaataatactgtgcgatgcgatacacaagtagtagcatgacttatgagcgggataagagcaccaaagaggaatattaatccctacatataagaactataagaatagtgtagattttgaaattttcgaatatggcgtgactgtacggtgactccatggcccctatttatcgtacatggagattctcttcaggctcaatgagatacagaatacaatatgttagatcctacgtagtcttatgtatgacttctttataacaaatatctctgaactcctaaacttcctccaacattcccaagagaacaggccagacaccacctcacgtgactctatagaggcacggcgtaacaaaagcggtaaacgcaataccaggaaatctctgcgagggtcttgtctggactcggacttctctctcctagcttccttgaaacttgtctttctaatcctcatctgcgaaaaatccctgttcttttccaaaaacatcccaaggcaagaaatcctatcgtcatccgtcgttccccacttatcgcgggacccagacgcgcgctgaaagccctgcgccctcatctgaccctttccctacagcacatctcctagcattttccacacttcgatccggaaacctcgaatcccccaccttccccgaattattcaatctttgccaatatgggtcaaaccctatcggagccggtggtcgaaaaggtgagtcgatatttcgcttttttgattcacaccccacactggcccattgtgaccctccaatgtcctttcttatggcgtcgaaacactcccctttcttggcttctgttatacctctgaaccagggggttatggaccgagtccctctcagttctttccgttgaacaaatagtccgtgctgtcgctcggaggaatcttcctcgggttgccatgcggggtcttgggtagttcagctgagtagtggggggtggttcgagcagcaacgaactggcatcgcaatcctaccaggcagccttgcatatgttgtggaaaagcatcgagtgtaactaacttgttatttttcgcttgttacagacctcgtccgaaggcggggatgactcctgtgtgtatggtgtgtcggccatgcagggctggcgaatcagcatggaggacgcccacgctacaattctcgacctccaggcaaagtataccggcaccaacgaaaaaccgaccgatccggaacaccgtctcgccttctttggtgtgtacgatggccacggtggagacaaggtcgcattattcaccggcgagaacctgcacaagatcgtctctcgacaggatgctttcgccaagggcgatattgagcaagccatgaaggatggtttccttgcgactgatagggctattttagaaggtttgtgcgatgttgtcgttgccgaggtacttcgtgctggatcgctgacttgaacccagacccccgttatgaggaggaagtgtctggctgcactgcttccacggccattatctcacagaagaagatctgggtggtatgttatgaccttgaaaaaaaagcccctatatccgattaaaggggtaaactgaccggtcaaaggccaacgctggtgattcacgatccgtcttgggtgtcaagggacgtgcaaagccactctcattcgaccacaagcctcagaacgagggtaagtgcatggaatcatacaagccgctacatgaaacattatgagggtctgacaaataattcaaacaggcgagaaggctcgtatcaccgctgctggcggcttcgtcgacttcggtcgtgtcaatggcaaccttgccctgtcccgtgctatcggtgactttgaattcaagaagagccctgagctctctcccgaacaacagattgtcactgcataccccgatgtgaccgttcatgagctgacgaatgatgatgagttcctggtgattgcctgtgatggtatgctttctattactccctctcgctattatcattgctaaacaatctacaggtatctgggactgccagtcttctcaggctgtggttgagtttgtccgcagaggcattgctgctaagcagccccttgcccatatctctgaaaacatgatggacaactgccttgcctccaacagtgagaccggtggtgttggctgcgacaacatgaccatgatcgtgatcggactcctacaaggaaagaccaaggaggagtggtataaccagattgcagagcgggttgcgaacggggatggtccttgtgctccgcccgagtacggcaagtctcccgaggaacccgaaagcatccccacttcttcgtgctgacgggcagttcgtgcagccgagttccgcggccccggaatccggaaccagtttgaggataacccggatgaatatgacctggagatggagcgttcgcgtggattaggtgtccgttcgggccgcatcatcctcttgggagatggcactgagctctcttcggaccagaacgatggcgaactttttgaccagaccgaggaagaccaggaccgtaccaaccaggtgcagcacgaatcaagcacccggaacgaccgccaggccactcctggtccccaggggaaacaggagaatgtcagcgggacctctgctcaaatatccgaatccccggcttccactgacgccgagaaagagaagtccgcatcgtaggctatgaacttatgaaccgtccatcgattggttctccctgttttggtttcaacctggttttattttccctgcccacagtcaacgacccttccccttgattccacgatctatgccttgttttcctccccttttctttgttttgcaattagttatcgtcgggctccagtcccgagcctgttacaccctttttttaactccttcgacttgaaatggataattgtcagagacgggacatgcggcaaagagacacagacggaattgaatgagatgaaagacaagagctttgaatttccatggaggtcgatgttgaaagagagagcccttcgccgggagctaaatgggcctcatgaatacgtttcttactttatgccatcaccacaacgagttaccgcagaaaatgcccgctattgacgagccatttacctacaattcctatccgctttttttccggggtatttttcttccccctcctaattcccggtctattccctacctacggtcattgatttacctatacgagaatgagtactaggggcgcaagctggtagagctgggtattgattgagattttgtcaggagcaatggacaatgacaacgatcatttacataccctttggcgtatatccgatgcattgcgcattttctttgtaccttggtagatgtttcattgttctattctggcaacggcgagtcaggtatattgacgtaggccaagccaggatgggaaactcctaccatcaagtcttaccaattgcgtatttgagtctggtagcaatgaagcacaacagtactccgtaaaaaagagtacattcaacggtaaggcgatgtatgacgtccacgatgtccacgataacccctgtaacccacacgtggtcggtgtaacccagtcctgccaagcctttatttgcaatctcccggccgtatttgcaattctcggtattgtaaaattcaaccccgtacactctacatcctgagaccgtggcttatgacagtggagttcggcccccactctttccccaaacagaaaattaccagtgtcccctaaaaccgggttgccgtcattcagggttctacatcaattctctccctaattctctcggttccccatcctttcattcatttccctcggaagacatctctcattcattcttcagggccaaatcatcatgtcgccttctacttctcccgccggcaagcgcaagcgcagcgcctcccaccttcccgcgcccgtttccaagaacgtcacagctgacctccagtcgtcgtcacgcgacgcgtctaacgaagaagggggcaaggactcaacagggcccgccaatgccaacccccacaacgccaatggtacccgccacccttctaagcgggcccgcaaggctgccgccgccggtgctgcaagccacaccgaggtgaacggggtcaagccggccgtcaacaaggaagaccccggcgagccatctgcgactaccgccagcaatgagaaggaagatgggcctcggtcgcgccccggtttacatatcgatttgcccgaagatgatgagcctgttacagaggagcagatggcgcccccggtctttggacgcctgcaggatcccgtgggttatcatactaacccaccaccaacgggtcgctcagtacgcgtttatgcggacggtgtcttcgatttgttccatcttgggtaagtgatcacacgagcggatcaggttttggtttcagcccccaatttcttcgggctgtgggcttgctcaattgggtaatagttgctgactatcactttacagccacatgagacaactcgagcaggctaagaaggctttccccgatacttatctgattgtcggtgtgactggcgatgaggagacgcacctgcgcaagggtctgacggtgctcagcggcgccgagcgcgcggagactatccgtcactgcaagtgggtcgacgaggtcatcccctgctgtccgtgggttgtgacgccggagttcctgtccgagcaccagatcgactacgttgcccatgacgacctgccctacgaggccgctgagggtgatgacatctacggtccgatcaaggaacagggcaagttcctggtgacccagcgtacagagggtgtcagtaccaccggtatcatcacacggtatgtttcacctcccacatcaaatccaacggactacagctgacattattacctacagggttgtccgcgactacgaccaatacatctcccgtcaattcaagcgtggcgcctctcgccaagaattgaacgtatcctggttgaagaagaacgagctcgagatcaagcgccatgtcgtcgagttgcgtgataacatccgcaacaactggaccatgactggccaggagctcggccgtgaattgcgccagatctggcagaacagccgtcctaacagccccgcgcccagcgcccgcaacagcatggactggggaatgcgtggacccctcaccagcccgacaggcggcagcaagtcgcacctgtcgcgtgtgggtgcggaacacaaccgcgcagatagccccatgggctcacgccgcaatgaggatttcgctaccgggtacagtctcggattgatcggaggcgtgcgtgcttgggtaggttacatcccacaatcgctggatatgcagctcagctttatctagtttaacttgtactaatgttcctcatacagatggcccgcagtcgtcaatctctccaggaaccccctagtgggatgcacagtcccactgacgaagaactcgagtccgagcataacaatggctatgacgaggaggtgcgtggccgtgccggtcacgtctctgctcagtagatgacttggctgggtgcctttgatgccgtatgtcccgagaagctacacattgggtggtaattatatacctgccattccagtccctatagccgcaattccccccttttccctgccccaccacactttcctcctactcttttgcatatgtatccatcttttcatcttgcattcggttcgtgtcctatacctttacaaattgtcccgtaactggcggtttctcctatgtcgggcgcttggtgtctttttttttcttcttcgtgaatagactgtatgccggccttggcttgttcaagttcgatgcagttcttttctgatttgttttcttacttgtcttgatttttgctttggttgtggttcggtggtttcaacgctcctccttccccttaatactctcccaatgaactttttcttgtttgatgtctttgtatatggccttgatttggtggtgatgattggtgactcctttcctctgatcatgctctgaccatgatctttgatgttggtatatccttcaaggccattccttatcacctgtttgttctagtttgtttataaaagctggaattgatggacagctgatcgggtatggtacatcacctcgccttgatcgtgtccggatatgaactgcacatagattgagatagctttgtttgatgtttcagtttccaattgcgtggccaattgaaactttgcaggttactagatctgatagatgttgtgtcagtatagaatgtatgtcctgtacgactatatccgtgagcctgctagccctgatctacgtatcgtctcttctggggcattgccacctataggtcggataagttatccgtttacctagaccctgcatatggattgccagacttgaaaagaaaaggaaacctgtcatccacctggtttgtttggtagatgtatagacgaagtacggattttgatatgttgcatgccatatgataaatgccctggatactatctcagagagcacgtacaaggaaatctcgacagttcctcgacacacctaaagcggctagtggatgcgtgccactagcgaaacatagcgtgtgggtactaggtagcccttttcaagacaaaaatgcggcagtaacaatggatcagaggggccatgctccaccttggagaagctctagagtattcggtccactcagactacttgttcttagactgccaagtcgtctatatgtactccgtagacttcgggaattctgcagatcccgaaattagtgttaaaatgccctgtcaattactgaggttcgatgacaccgagccgcgacagagtcagaaaatcactttgacattcataaacagagtgtccgggcgaaaactcgccaatcaagagcaatatctagagcggctccagtaggaattccctctggtgaacgtgcaatccattgattttgccgcaattccatacaaagatcaattaaagatcattcaagaatcagatatactggcaggtgtccatggagctggtctcacacatggcatcttcctgccttcaggatcggccatggttgaaatcctaccacctggcctaaatcacaagggctttcgcaatgttgcttccctacggggtcatgactatttcagcccacaagggcgactggcactctgaagatatttacctggatgttgagcgatttatgaatgcgatgaatgtagccattaaggcaatgtataacaagtgtttgcgaagttatgatgtttgaatagatcatttttgccacattaagtctttctgttttcaatccatcccaatcgaaatatcgccttgcctgggttcttttactagctatatctatatgttgaaaggtcacctgacatccattgtttgctcctgctatatagtcttccacaaacctgtagacagtttcttctttctccccacaaccgagaattttctagaatcacctatctccattaagaaactattagacagtcactcaccattattatactatatacatctttacaacgcatacaacgcttgatccgcctatatctaaaagcagtgatcgcatctcctacctcatcgcgatttgcatgattatcgaagctatgagtggctttgcaggagcttcagcaaaacatatgtcaagacgaagggacatcggagttgaaacatcgagcataatttgcagtcatctcttcacgcctcacaaattcctcttataccaacgctgagaactgtgtaatcacccagattaccggccgacactggtggcatagacgtgtccgctatcctcgaagagcgggacacctagacgaccatgatgactttgtttttcttctgtgtatgatcgttataggcatctacaacaccgagaaataaagcaatcacgagaaatttgacggtcaatgtccccacttatgtgacgaatcctccgatatgttgactactaccctactccccatggtcttatacgaggatcccttctgtgagtcctttccaccaggctgttttacggtcgtaccactaacatttcggtaggatgtggccacgaggtataaccagttcctggctatacgagtccactttctctactccacccttcctcaattactttgggcgcgttccttgcgggacaaagctcataggatcatgagtggaaggttcatatcctagcttggtgaggggcaccaatagagcagacagacaaagggttgttggctggaacccagatttacatctacttcgagtataacgacaacactgtacagaattcggggtgggtgtttgtgaagagtggaagaagatttgcgcaacatgtttgtattattgctacttgcccacagtctatggtttcggtttcttcatcacatttgtcacatatcatgtccatgaccagttccatgttccctgtagacattttaatatagaattgccattttatcgcaggtacgtctttatgagagaagctactgtgcagaataactagtatggaaattcgaattatactattgtgccattattactttaaagccacgctgctttactcgtataatatggacacatcaaagtctaacataattatagcaatttaatcaaacatcatctcgtatcaggcacgcttgcagcatagactcaggttataccaaagtcgtatagaaattatagtagtttgattcaaactctcattactaacggtggcatcttaggttccctagggttgtaggacaaaagatttcgtggaaatgagatgagacaattattagataatattaatgtactaccttgtcagaattgttctcttattctagcagtaagttgtcatatattgcacgagccgacctagccactatcgtcatgtacacagggggcatctctgttatcaaaaatgagcatgttttcattgtgtacaaggattatgtggttgagtttgggccctctgtgataaccctgcatgctcagctagtcagttttggttttaggtgcatatggccaagtgcagatctcattcattgggcgtgggtgaatggagctagtcagttttggggtttgttatttggtatctatttcgaagcagccgtactagccccaagtgttgataatgaattccgtcgctttggcgatatgaggtgaaatcagagggagccatggaggggaaggacgctgaataaacaccgaatccaagctgttgaaaagaacgtatactcctttttcctctctagatcccgacatcctccttctcggatattctttgtagttgagtaatatcccgaacaacatctctagcagactgatattgttgcttccagcatttttctgtgatataataacaaatatgctcttgctcatcagatggaaataccccttcctcatataaagactctatcttctcctcatcatcaaagctatctagctccggaaagggttcgtgtcctgtcatgatgaaataaattgcggagccaagtgcaaagagatcagtgtgcacatccgcatagtccccgtgaactcgcggtcgaaatgactttgtacactcacgagatagcccatctagtaatgtttcaccatcactcgacttgagcatgccttggaaatcagcaagtatgaggtccaagttctcatcaaggagcaaattccgaacatttagatcacaatggataacacgctttgaatggatataactcagtgcctcggcaggttgttggcaccagttaagccttctttcgagaggaataacgtgatccgaggtgatatagtccattaagttgccgtttggagcatatcccagaagaagaccatgctcggccagccccttggattggattattcgcggatgagttccaaggatgtcgagaagttgagcctctacttcaaggctttgccggtccccaggaacatgtgggtatttcaagacagtcgtgtcatcaacaaggccgatgtagcttccaccaccccaaccaatgatctctgaaacccccggaagatactgatggattatccgaatttcgatgtgggaggcgggggaatcggatatatcatttccagccggtgtcgtatcctcctatattaattagtaattatacacagtagactaaagatggccgagacttacaggctctggtttcaatgcagtgctcgctgatggaatccagccacacaaagccctgtagacggaaccgaatacaagattaagcggataacatatggttctgaatagagtcgagattactgaaaacattatggaagggttaattattccctcttcttcgtgtcttggcttttcgaatgtactgggacgtgagaagggggaatgggtagatgtatgcaaactatgcaaattttaaaatatgcaaacccctgtagctagccatggatgtatcggctaatccccctatttcggaaggagatcgggttgtttgcatgaaacggggttggaagatattcatgcgtttaaggactgaccgctacagtcattggcccagtacgtagcccagtcctgcggtaacatatttgaaggtagttgccctttgatctcaaatgagatatatatgatgattcttatattgtatgaggagaagaaacctcaagcagcagtaatagccaacctaatccccctcctcttcctttcttccatatccatcgcctccaacatcctcccaaacccgaccctctccctcggctcgcataatatctccctcaaaccctccctcaaaaggccgacgtccctaaccaactccccctcaacaacccccttagcaagaatatcgcatctagccgtaacagccaaatcaaacacatccaatcctctaaccccaagaatcggcttcacccactcctccccaatcccaaacggaatcctctgacccgacacaaccgcctccccagtactccccaagacactagtaaacctccccagatccaaactcaaccccaactcccgcaatccctccaacgaggcgacaacatcccaaaaccgcacccacaactcatcactatgcgtatgcgcatagatcgaccctttatgatccaaccccgccatcggcacccagatcggcatccactggaccgtcagtcttgaaatggcattccgggcaacaggcgacagcgacgctgcgaatgcaatgaaggtgtatagatcgtcgacgtcgaaatgcgaggctttatacaggattggctctgcttcgaaatagatggcccgacagacgcggagcagggcactgttgctattgcttagggttgaagggagaagggagtgagtgtgtgggtagaggagtctgtcgctgtggcctggcacgcggccgtcgtagatgcgccaccgggctggggttgtggggcagcagtggcggttttgggttagggaggggtttgacggaagttgggagttatggggcttttgatgagggctttgggctggggttggacagcgcacatggcggattttgccttttagttggactaagtggatggtttgaggggtttgggtgtttggagttggggagttggtgaggacataggaccatattatttggcggagttcaggtggaaggcagagaaggggagaatcttgaggttcgaattggaattggcttgatgctgattctggattccagtctataggtgggtggagattgctctctggagagcagattgcacgtgattggattaaatcgcggacggtgtcgcgccaccgatggccagttggataataatgccaaatagaatagggatcacgaaggacccaggcgtcgaagtggcgcattgggatgtatagaagtgaagagtaagaaatacggggaaattatggggcaagtgggcttttatggagaaatccacaattggtatagactaactagtactggactagacttatatattgaggtcttggttgtaacctaatgacgtcgagacagttggatttgggatttatcccgtggagagggcataacacagatataatgcaaaagtgcatattataaagtgctatatctattgaagattccaaggttcgtcattcttttcagtcatgtacgtgtagttagggatttgcatgatcacggcgaattaccaactgcggtctagcgtatcttttcgggtttagcgtgtttatatagagtccggccgcttcaactttctgctttccctgcttttggtgctgccaagtgtaaggggcctgaagtacgtcgtcattgttgtcgcccgtgcgcttggcactcctacaattctatctttctaaccatagagcacatatttccatctttcataggattgtacccttttcattcctagacttacatcgtagcatacagaagtatatagacaatgcaatggcagagggggctcctagccaatctaatttcagcaaaggatagaggtcaaagcgtctacaccctaaccctaaccccataacgatatatacaaaggcttaggatgcaagcgcaaaactcaattctcctgttctgacccctgcgctctctcctcatcatcggcgtccttgaaactctcatcctcagtggcatccttgtatccctccgcatcacgatactcctccactccactatcacttccgttttgggcaggactctcatgcgcaaacaccacataaatcgcacaagccaagataatcccagacccgatccaactaatgggagtgagcgtactcccccaaacaaccttatcatagaataccgcaaagaacatctgcatataaaccatcgacgtagcacgcgctccctgcgcgacaggcttcccatccgagaccgacgcaggcgggacgtacgacaaacccgccgtcaacaggaactgcaacaagaacccgcagataccgagcccggtcagcagtgtccattcaacggccgtaataggcactcggaacggcacagaaggcacgaccgccatcgcaatcaaagaaataatcgtcgtcacggacgagaagtacgtcacggacacgagggggtgcgcacgacggccgataatacggatagtactgtaagcacccgaagcgccgatcacgccgatcaaggcgacgattgtcgccaggatgtggtggtaggagtctgtttcggagggtggtttttcgactgccgaagtggacaggcctaatgcccatgcggcggctgcggttggggttgcaaatgagacgcttgggtcgtgcttgccgaaggggcgggcgatgagcacgacgccgccgagagagattaggccggcgcatagctgttttcgggaaaaggtctcgccgggaatgaggagcgagcaggcgtagcaggagatgattggtgagaggaaggttatcactgttgcttcggagagggggaggtattgcacggagtagtagagacagtaaacgccggtgaagccgaagagggcgcggaggaggaggagaccgcggacgggacgtgtgcctagtggggagggtgttgaggcgatgtacatgtataggtagcttgcaattgctgttatggacatgcgggcgaagaggatctgggggtgttagcttggtttgtaataatggaggtataggaatacggatatgtcgaaattatgtgatatcaaacatatcttccctttttctgtctcttacctggaaaggatgcatagagctatggatttccaagatctgcgtcatgacattcatagaggcagcgaaggcctgcgacagtaggacaagtcccatacccttattgcgtagccaccatactttccatgcacggcggggtcgcgcagctgcagcaatagcggcagcgtcgtcatattcatcgtcctcgataggacggggttctgattgagccagtgctggtcgggggtcggcttcgctaccactttcacagttgtagtcatgttcatcctcgccttgagtttgtgaagatgatctcttggatctcgggttcgatctcgactgctccacccggatcggcagcggtgcgtccggatgatcctcgtattggtcggcgcctgaggccgaatcacgttttgaagccatgctgggatgtgagatcttggcgtcgttattggagaggcgattggtgcggggattgtgggggatggagatggaggtatctaagatgacttttcctctctctgaaatcggatcggattattcttctatagagtctgagtgtacagtgttctcctcgagaagagatatgcagataaacaatatattcaggcgaaaggaaaggattcttatatctgcgctggactgccgatctggttaaaagagatttcagctcgaaatgcgcatgacggccgagtggagcccccgttgaccactgaccgcttctctttttactttcttcttgctttttctttcgacttttcgtgacttccatgatctttgaatcgacttgactcgaactggtttgcagatttagttgccttgtccctggttgtgtactaccatgtactccggactgtacaagaagcacaagcggcacacgacctacctcatgcacgatctactagctacatataaatatgcacctaacggatatttatccgctttcctttcctttctgtgtttcatttcatttcatttctcattcaagtttcgatttgcgtgatattgcttactaatcgccgcttcaagcttccaaggttccaaggttgggaatcgagctacccagagatgagctttgtatttaagggtttatgcgatcggcttaagtcgtagatctagcgagctagactatacaacatacatatccatgtcatagaaagccacagggcccatgatctctcagagttgaaatcacatggtctgtgcaatatatcctcttgcacttgagtggaacctcagggttggcttcatgatcgggaccacccggatacggttacatagtattctgcgagcagcctagggtagagatacaatctgagcttcgtagtacacattaatccctgattctaatatattattacagactcagacaaatttgcaccgaagatatgttatagtttctttttctttcgttgcgtggcaggccgaataaatcgaatggtacacgtatgtacagcgttgtattcgatatcacgtaggcttcatagtggagagcttcttcacggcactcagggtcgagccaatcatgagagaaaatgagagaaaatcgtgcaaagtcggtccgaacccgacccaccaatcccgaagcggaacatctaagacggtagatccaagtcctccatacagactgtcgaaggacagaaagtgtgcttctctttgagtaagatgcgtccttagtacagaggccgtacttgtatgtttccatctcactatatgtcccgaaggacaggatagttatcttgctccagcttatgtatggaggtggaagatactcgaccgtggttggtcgattattcaagatccgcttttcgcgcaatgtggggtttgaacacccgacatcactggctgttgtatcacgtgacttccaaatagcgtagggccagttatgctatgtatcaaaaagacccacacctgtataacctcaaaaaggacatgtaaaagaaaaaaaaaaataggtagcttctctttgattgagcgtgtcatccttagtgcaggggccatgctaatcttctctgtatattttcatttgaccatatgccccgaagggcgaaatgacatccttatagttcaatataacctcaattttcggcataattataccgcctatgtattactttgggcttaggcacgtgataccaggttacgtaatactttacagtccacagcagatttacagttctgttcaacctttatatcatgcattctctagatctggttatttcggttactgtatccacttgcctcaaacacctaccaaagaaatagtacatatggtcatgttcgttaagacaaatgatcagttgctgctcacagatcttcatcaagaatcagaaagagaacctgttataagtcattcttaattgtttagagtaatttacacacgctaacaagagttgcggtcagggtagttacagatttaacatacctaaaatagttagttaaagtatgccgtaagtaaaatgactataccgccagtattatgtccgacggcgaagtgtgaggcacctacggggtatgtatctagatgataaacaaagaacagtgcagatgaagtggtatgaaggcatagttcatacgatcacaataacatcgaccttgaaaagcatacacggctatatttatacaaaagtaaacgtatcaccccccttctcccgcaacatatttccagtcctcgaggtaccaacaacacgctccaacttcagcgcatcccacttcgagaacagcgcacgcacaccagcctcggcagcctcgatcaaagccgcaggatcaagacccaagaacccaacgatctcgccatagaacagcgcgttatctgggagcccgtacatgaccacacgcttaacaccgcggatctggtaacggcggaagtggtgcgcgcgctcggtatacagcagcacagagtggcggccggacacgaaatgactgcgggcacggttagcctccttcggctcagtgtattcggagatagcgccaaaggagacattggttgtttgcgtggaggtggcgaagtggttacgcacacggacgaagtcgaggtaggaggggatgaagatgagggtgccggcgccgcccttgccacggccgtgcgtgatgttcttcaccagagtggacagtatagttgttgtgaagtgcttaaagcgcgcgtcggggtctttaatgggcgacgtgctgtcgatgcgggtgaaggtttgcttgacggggactgcgagtgggagctcggttatggcaccggcatatatgggggttgctttgaggcgacccgagacgttttgcatatgggatgagaagagggcgttgatctcaggcgtgatgaaggatgagaccactacagtttgtcggacatagcgggcttggttgtccaagtaccaattacggacacggccaaagtcgcagccgtgcgcttgtttcggttgcaagttcaggtgctggaagatgtagtcgacgtggtcccagttctgcatgagcatggcatcagcgtggtcaaccactaccagctcaatcgaggagaggaaatcatgatcgcgcttcttgacgtcagactggtccatgatcgtacgcagacccagtggactggccagaatgatgtcggagctgtagaattgcgcgaaatatttgactgtcttgcgcgtgaacttgagacccagtcggaacatgtcgtcgtcattgccgccgaaaagttcccggaaatcctcggtcttatgctcccaggactcatcattcggcgccgagaacgagtcagtgaaacgttttttgttctcttgctgctcgggctgatagatccgagtgatcgcatcgagaaccttaacacatgcttgtcgagtaggcagaatgtaaagcaccttaggtctggtaaatccttggtcacggcactcgatatcggtgtccgggtccttggacaaacgggcgttgttttttaggacttggtctcgggtcttcagcaggtgattgacagtgtgcaaagcaataatctcgcgcatctcattcgcattagaagcagtacgggcaccgtagagaacgtcttggtagttaaacacatatggcgcgatgatctgggcttgaccggtgattttaggcaggagctcggccgcacgagccttcagtttttgtttaagctgcgcgattgcatgttagtatactcaaaatacaactcatgtttattccgcataccttgatgttggtcgtgctcttcattggcggaaggattgatggactgttttctcccgtttcgggaacagtatgtaccagtcgtagcccatccacctctttcttgacggatgcccatttgttcgattggataggctcaatctgcttgatcaaatctgcactctcgcggagatcgaagtgcttctcaaaagcagcagttgggtcctcgtcctcgtctacctcctcctcttcatcgtcggacggcgcttgggcttgcaaatcatcatcgccctgctctggttcctctggttcctctgcggtttctgctatttgaatctcagcatttgcgtttgcgtcggtggcaatcttgcgcttcttccgagctggtccgctggactcattgggttgaagtagctgaaggagttcattgtatgggcgttcagtattctcgtcttcttcgtcgctgctggaaccctcgtccataacggtctcatcaaccaattcctcttgggattgctcgctagcatcatcttctccgccagaagaatcgtccgatctagtgataattagacacagtcattagactccagactgtgagaacttactcagactcgttcaatcgcgaagtcgcaaaggaattgcgaccaccacgaccaccgcgaccgccgcgaccacgacctcggccgcggccaccacggccaccacggcctcgagctcctctaaaagaaccaccacgaggagcaggcatgttgcgaataactggaaaagagtgggcaattccaagctgttctggccgaaatgagaattttgggggcttatcttatcttagcgcgaaatttcccacacacaacagaatcggaacaatcagagcggctcactccaccaaggaaaaattgaacctccgagaaacgaaggaagtttggatcttgaaacttgcaagatattccatccccccaaaatcaatcatggccgaagattctttccttcatctcgctcgccccctcggccccgttagtgtggggaccgctcctaccactgcccctctgaacgtggtcatccaaccccaggtatgttgcgatatgtgtgtgctatatgatctgaggggtaaagctcattcctcccaaggcaatcttttcagttctcgaccactctcttcgccgcaatgccgatcaggagcgagttatcggtacactgctcggaacacgatctgaggatggaagtgaggtcgaggtccgatccgccttcgctgtcggccactccgaggctgaggaccaagtcgaagtcgatatggaataccacaagcagatgctggctttgcacctgaaggccaacccacgcgaagtcttggttggctggtacgccactgcttccgagctcaacactttctccgctttgatccagaacttctacagcggccagggtgatggtacctggcctcaccccgccgtccacctgactgtctccactgaggctggaaaggatctcgagactcgcgcctacatttccgcccccgttggtgtcaccgctgagcgtgctgccgacagcgctgctttcatcccagttccctacgagctccgatacggcgacgccgacaagagcggtcttgagtctatcgccaacgctaaggatgccgaggaccgttccacttccgtcacttccgacattgaatctctggagcgcgccattgaggaggtcctgtctatggttgaccgcgtctcgcgctacgttgagtccgtgatagacgaggagacccccgcttccactgccatgggccagttcctgcttaacgctctcgctctcgctcccaaggtcgagcctgccgacattgagcgtgacttgtatgttaaatctacattatattccctggtgtttcttgccactaactttccacagcaacaaccacatccaggacgtcctggtcgtttcttacctcgccaacaccgtgcgcacacagatggagctttccactcggctagcgaccgcccagcttactctcggcggcggcggcgagggccccgctaccggcgaccagcgcaatcagcgtggcggcaagggcaacaaccaaggcggccgcccccgccaggaccgcaccgaggagacccgcgcatgagatgtttcccacagcaaaaaacgctgatgcataatgtgaccaattgcgagaggaacactcctctccaagtgaacgtggatgtctcgtctcacgttcccttccctttctatctcacccttccctgacattattacttttgggtctttcgcttcttgttcaccaaccctctaccgccttcgtccctttttttcctttttccggcttcctcttttttttttactcgcgaggcttacatgttctctccggagctcacggactgtggcctggtcccatcaacggcttccggactcgctctgttttgacgttcaaacacggtcttcaacacctggtgctgtggtattgagaccgatttactatcaatatgattggtataacatgtggtgatggttgatgaggtgacgatgtcattaccgttcgacgatagagaatattcgggggtgatgagtctagactgttgaagatgagagatgggtctgcgagacccgatctctccggttacgaagtcgcatctttctaggcgcggcgttttcagttatgatgaaatggacataaaagttctagagcttcttcgtattgtatatttcccaccatttactattccggctatagccataagaggctcacgttatagtcctccttggtcactgaggtttcgtatggttccaattctatctagatatcaagcatttcttgtcggctaacgtccaacatatcagtatgtcacttaaatgcgacagcttcaggcttgttgctatactcttcatcgtcctcttcatgccggaccacccacctgttccggctgaactcatctacctgtgctactcaagcagcagtaattgataagcaagctggatggaagacacgcttaggcttcagtattgagatgttcaacctctatgtttttgttgcctcgctcgcaccgaagagtctctctttttgtcttcctgaaagctcagatggtggactggcgtgagtgttgacaagatggcatcggacgggcaatcatcatcataatctaagagaaagtagagattccgaagatatattcattgactagttgtatacttgtcgggggtccgaatcgaatgtttctgaggacgcggaatgcacggctatgagttctatttggcgcaccataacacggcctttgctcctgcgtgcgacatctgattttctaggggacaatgtcgccaataaggtagattcgaaggaatatttcctggtacagtccgtctggggcatcatgggggaggagccttgtcgtggatctggtatttccggtattgttccgcggttagcatagtcaaaaggtactttcttgtcttttttttttacgactagaagcctcacattcaatcagataccgtaggtctattgagagagatacccatccaaagttggagatgtcgttaagctgggaggggcacggatttgacgagattgttgtcagtctaggactgcagctagaaggcttatatttgttgaattttatggaaggcacaaatggtgtattagtttacaagttagcctcaatgtaggtatgtgcatgtagatacagccctagacctcatgtttcaaagtggggaaggaggctggcggatctgaaccttaatactttaatttgactatggacgggaacaatgtagagacgactcaggctcttggcatggttctactactgataaactacagtatataacgaacgtggttctagcctagtttgctcctatcaccgtggtcaaagcgttgtgatgtcccagtgattgcatcgggcgagtgggagggcgcaaatgcgagtcccgatgtctgtcttacctttgatataaataaagtgagcattgggatttgataaatttccattgtatttctctagttatttcttggtattggaaaaactagctgtaaatatattggcgaaaagaaacacacgttgggcattaagtcatgttcgtcgtgacccacagcaactgggcaggaattggtggagttattgagggtatatgttcagccaatcgtcttacgcttcttcgaaactgactcctcggtagcatcagatccacggcgggttgcagcacctcttttccccttgcccttactcttcttggtaacagtagcagcggcagcggcttcggcagccacaggatcctcgccagcagcagcagcagcggccgcagcggcagcacctttctttccagcttccttagcaacctgatcatcattctggtcaaatgctttgcgagcttctttcaattcacgttccatgcgcaacagctcctgtacacggccgagcttgttctggtcgcgacgcagtgcgaagcggaagtcctcaactttgatcttctgacggcgggcgtggtgtgcgacttgcgcggcgccgtggcagagttccaacacgaagtcggtgacaatttcgtccagcacgcggactgtctcgggaagtggttcgttcgggaagctcgggtgtgggctggggtcgccgtaggcgagaaggagcaggcgaactgttggatatagttagtattgaatttggctttgtaacttctattaatgaatttgcatgggctgccggaacttacgttcattctgaaagttcatttgacccttgtgccgggccgtacgcgcacgtggttcggccatggtgggcttggttgtagactcttttttgtcctttctagtcgatgtagatgccgtgtcgggtgaactaagagtccacttaggtccgtatccggcacaatttagcactgtatcttgctcatcgaagccccaattaggcgagagttcagagacaagagtcttcgagctaggctgacgtgatggattgcgagtcggattggacgagtcagtcttcgaggttgatgagaaggtgcttggagcttggaggtgagcgtttggaggtgctgagattgtagtctcaaagggacagattggagtccgagtccaggtgttcagagtacccaatccagtgtgtgatggcttaagaggtagcggagatgcgtatggcggcaaggagaatgatacccgcttggccgcttggcccgtgcgcttggcggacataccaggcagaatatgctagactgggggttagttagcaaccttagcacatgcaggtacctggcaagttacggtcgcaattctctttctttgcccaagtgacgggtgaagggtttacagttgcaacaaatggtgagtttatgtaaatggcagaatttacgagagcaacttttctgtgagaagtatatgtggcttggctttcgcgtggcgttcatgttggaaccacaatgatagtatgattactgtgctaactatcacactcacctagtctgctcttttcaactttcaatcgttgcttctcgtgattctcctgataatctgcacgagcagctatgcgcactcgataatgccggggatcatggaccggaaccagaatgggtaggcgaccacctgaggatgcgcatccgggatgcaggaagatgacggggagactgatagttctttgatgtaggatctttgggatattctggaagtctgctcgggtcggagagcgactcagcccatacgtcagcatatgctgtgtcgtgatggcagtaagttctctccacgagtcccgatgtatgaagaaatatacatactgatgttgcatgcaggtgtcgatcttcttcggtgattaacattgcttaagtctcaatgggtgtttggaggggaattcctacgtgataatcaatgcttgtggtagtccccaacttcgatcggacctcaagtaaccttagtcgggggttataagagattactattactatttgcccttcacgtgatggtatccagatgcaatgagatattcagacgaacaagaggttcatgatgcggtagtatatagtacataatattaaaatctacaaaaaaaagttccaaggcacttcttcaggaccaatgcgtccaaaatacttgaccctccaaaggcggcagtaaaagacaaaagggtattcctattttacatcttaggcttcaactttgactccaacttctctaacccattgtcaatgagctcgtcgtgcaccttctgatcactgtgaacattggatgcgggctcgagggtgagaagcttattagttccatccgaattaaggccctcatccatctcctcgatcgccacccagaggcgttcggggtcgcggagataacgcaaactcttcatcgtgtaatggtcgatggcaaagccttccctttccatcttcgtgattgcactagcagtttcagggatggcctgcgcattggcgaatccattgatgatggtgttccaagtcacctggttgtactccacattgtgcttggccatcatctccttgactttctcggcggcatcgggctggcgactgtaattgaaggcactgaggaggatggtccaagtacgatgcgtgggtgcgatgtgcttgagaggtttgccagtgatagtttcttttggtatggcagaggtgtcaagcatgtcttcgacgagacgtatgcttgaccttagtccacggctgcttttgcggaaggcgatgaggaattcattatagacgtggtcggtctcgaccagaggagcgatggatggatggccctgctgcacgagctcgcggaatctgtcatacatgtgatacacttgtgatatccgattccgacaacggaagaatgtcgcgatcatgaggaacaaagatactggagatggtggggttttcaattcaagtccttgacttggcggcggtgagtatgagggagggagtagaaggagttctttgagcggtgtgatgtcgtggattttgttgtacatgtcgagcatagagtagaaaactcccgagggatcgctctcgggatcaatatgcttggcggtaaaagtgaaatgagcgtggaagattttgctgaaaatgtatgggttgtttcgtaattcctcttgcatctcgacttcccgcaccagctcgtccacacgaccccggtcgcctcgagacaccgcatcagtgaggagagtcagatatgtataagaatcgaattcgtggtggtgattcttcatgaactgaagcatgtccgaccccaattgaggatcaccggttttgtaagcattggcgagcacgagattcatcatgtcccggtctggctgaacacccattttgagaagccgtgggaggatccggaaatttcgtccgctggcgttatcctcaacggtgtccagggtcaggagcttgcaacagtgccgtaagactccttcagagtccatggaaaattcagggtcattgattttgggaatgaattcgagagccctaagggcatattccacgtcgttcaactgtgtgaatcggtacatgtagcaaagtgctgtttgcgcttccatcgtgatgcctcgctcgttcattaaacggaaactctcgtagacacctaagaagcccgctcggcgaatatagaatcgtatacccctttgtggcggggagataattggccagtcctttggatccagggaagttgcaacaaccgattcgaatgtgtgggcaccctttgtccaatcccggagctcttcataatgaaatctttccaagtaagtcaagcaatcaacaaccatagttaaatctggcttatctcgtggctcagttgtgacgagtaaaaactctaaggccattgccgggttattttgcagaagccaaatggccaggcgttgccaggcccaagccctgttagggcgggtcattgccagccatgcctctcgaaacttgccttgacagtcttcgagaagcaaggctagcagttgctcgccatcttctctcagctttggcaatgcagaattgtgcaagacctcacggccatgtgtcttagccttgtgaattgctccatatgcctctttccattgacggagacctagctcacgcatgtaaagtgaattcattcgcattgaaagcgccaggtataacccgcgatcggtcaaatgtcttcccttgtttaagatttctcggttgactctctcagccgccatggcgacaagcttgggatcagcttttcgcacataagcgaccttcttcattttatcattcgttataatcggtgtctgtgatgaacttcgtggttgggttgaaggttttgattgtccatggcctatgccatactgatttgtcgcgacctgatctgattgttcacttgtcggcgaatgtgaactgtcggttgaaccgcggttgtgttgatatgatatggggtcaggagcatcatgtgtcacaccaggttcgaagattgcaggagcattgtatgtggagaggcgcactctatgaccaacattcgtccctgactcccgataccatcggcctagagtccgacattgtggtgacagcaacccgttgagacgggaccgaacgagttggtgcggacacgatgacattcaggagcttgtacccgcagacatttgggggaaagaccaagacgaagaaaataagtcaagtacagagtatggcgaggagtcaaagtccaatgccggacagaaagttgaattccgccattccgcccgattttgccgtggctagtgtgtggcgcaccacatctacttttatcgcttcatcatcttcaactttgaagcagcggaggagcttgcgaatttcttccggtcatacaatcactctgctttccagtccccaaatcccagatattccattcaccctcagtttaaccatcgctcgaaaacatgtcatcaaaccatgccagtcttgatgcggcatccaccgaccgcaaagcccgcctcgccaagctcgcagctctgaagcgcaagcaacctgaagaagacacaaatgaggccagtgcggaagaccaggagctgcctgacgccgattctacgccagatgtgagcacaaaatatctatccggccgcaactacgaccccgagactcgcgggcccaaactgggcttcgagcatggcccgcaagagggccaggtgacgctggaagcacaggcggctaaaattgcaagagccacagcggaacaagccaagaaggatgcggatgccgacgaacccattgatctgttcaaactacaacctaagaaacctaactgggacttgaagcgcgatctaaacgaaaagctcaagattcttgatgtacggatggaaaattcaattgcacggatgttgcgacagcggttagaggacgcgcagcgtgatgcgaaggcgcgtgggcctaagtctaacggagacgagcagggggaggaagtgggcatggagggtgaagcgctcgttgagggcatccatatgcgcgaacgagaggaagcaaagagcgacgaagaaacgatttgaacttgataccctttgtgttgcaggaatgcgagcgttgtctaggtcttctgcctccacctgtaattgtctatattctgtccatttaacttattccttttttttgttgtctcggttgaggcgtccaattgatgccatgggcatattgcgcacaaaaatgaggcgttaggaggtttacaaatcaagatcctcaatgagcatatctatcttagtgtcgttcagaaatcattattggattttttttagttccgctgtccagtgacagatactttcaaactccgcaatggagatgctaatgatacacttagtcaaatactgatggaacacgaattggcgccgtgttccccctccatcaagattttgcgccgtatgaagccctaatattgcagagcaggttttcaattcactttaccgtccgttattcatggcttgagtcaaagcaaggcgcttactgaaaggactcaagcttcgttcccgaggaagctggttcttctccattatgggatcaggcttagagcgtccagattgagactgacgtgatgggattgcttgatcacggtgtgaacggtcccggggaacgtcctgagtcgtagcacgtgattctttcactcgatccttatccacactcttgcttcggcggtcccttcgctcgctatgtcttcctgctccacggtgacgacctcgttcttcggggctagattctcgtctccgtcgccgggtgtttcgatcgtcggttcgctcttgggagggtgagcggtcccttggtcccgagtagaatgaccctgaagaaccctctgttgaatcactgaagcgtctctttcgggactttgcaggtggtgctgatgaatcatttcggcgacctctgtcagatgcgccgtatttgttacggcggggagatgaggaatcggatcgattcgtagatatcgtttccactgagagggacctagcccgcttcggagactgaacgccgcgatctgtcatatcctcaaggtctctcttccggccacgctcttcctcccgagtagcaaggagttcgtctgccacaccctctcttcatacaagttagcgaggactccaatgcaggaaaatgcagaaatgacaattattcacgtgaacttactttcgcaaaaactcatttggattctcacttgaaagcttgggcatcaattctggattcagtagctgctgagtccttgaaggtcgcgggacatatgggcgctcttgcgcggatgccttgcaatcaaagctatagtgtcgtggatcggagttagtcaaacgtccaaagagcaaatgaaatagggtacatatctcgtccaaggcatttttggcacagtgtggtcgcggtggccctgttggagttggagcctccaagcttcggggcgtttcgatatcggttcattgggactcgtgatgttgtagtttcgtttagaatcctagattggcaggtactttaggtctgaaataaggctattgacgcgcccacgataagaaacacaggcaacatccgacgtaaagctgatcggcgcaaattagcgtctgttaccctttgaagcctaagggaaattgtaggcgcgcgccaagggcggtcgggcgcggcataatgcccacgaatcttcaggtaatcaagaattcagaattcagatccccaacgctccttctcgatctcggagttcattgtcaacattcacgtcatccatctcggacggacgatctagagttgatcggctcttcaaatacccgtcggatctggaatcccctcaaaactcggtacgagatctccctgactatgagccagctttgatatcatgtaaggccccgttgcctgatccgcctagacttctcgctctattgaagtggatatttctcctcattgatcctatggatccctttactttcatgcatggtgctaatgcgcattctccacagctttctccatggcgattgccctaccccagagatatgtctttcgttttgggcttgtgtgaaacgaaattacgcagcgacattactttcaaccaaacaagcttccaccttcttcacatttgcaaatccgaagcctgctgagtgcagctgctgcttgaccttgatctcggattttctttttttttttttgtgaaatttaaccagtctcagcgaccatcctgcagagtgttgtcatggcgtcaaaaagtcccccaggtggagacggccctctctcctttgcaaaggtaagctaagagtttgctccactacctcatggctcatcgctaattccgtgacaagatcgccgctatgcccgcccccctcagcccacattcttcctcggtatctgatgaaaacgaaatatgcgagccagcagaccaatcactttactcaaaagcaaatggctccggtgcatctttgcccagccagcataatgtcgataaaacgccagaggctagttccatagaactagctgttgatgatctagggagaggtgtgcaagacattagcatcacctcggaaaatcacagtgatggaccaagctcgtttgttagcggccaagatgatggcttgctcaagcgggaaaactcttttgaagatgatcgcactcacctttctacctcatccacaaaaatgaccaactttgattccaagagtcttgcctcggtgacgacctttgcaatggatgaaaaggactctgtacgtcccgatgatagtgctagtgtgcaagcgattgatgaagaggagtcgctttccggacttgcttctggggctccaaactcagtggcaggctctgaagctggcagtcgtgcgtttcgggatcattaccgagatggcattcctacacgcccacgcggaattttgcccgtgcctcctctctttggcggtccccagccggtgaatggtgcaattcctccagattcaatcgcgaataatttcgtgattccagccaactccgatggcattgaagatggtcagatattacatgggtttcccttggagccggatgaaaaactcctagaggcaatgaaatcaccgaaagatcggctgctgatcctgcaattggaggaaaaaattcgacactttatcaaggactgcaatgagcagtctctagagttgcccccctcgaacgcgtttgggcgacttcttgcacacaagctaggagattactatcacttaacacattttgtcgataacaatgtgacatcggtcaggcttcatcgcacgccattctgccggctacccactcctttgtccgctgtgcatgctgcttccaatagcactccacctccagctgtcccggcaatgaaaatcatgcgccgaaacgatggagggcaattcgaaggaagtattggaggttcttcaaacccttccaagaccaactcggaagatggcgatagcggaccagatggagaacgtcactggtcttcttctggtgctacacacgctaaagatcgtatggctttgacgagggaggaacgggaggcaaaataccatgaagtacgtgaacgaatctttcgtgattttcccgacagtgccaaatcagatccggccagcggtgactcgaatcccaacatgtcacgctccagctcggcgaatgggcgcaaaaaaaaccagaggcagcgaactcctcatgatgacagctttgaggttcgctcgcagttcaatgcctactacccaggtatgcaatatggaaatggtgctgctcagtacaatgctcctgtaaatgacagctcatatccaaaccaagtaccttacttggtgggacctggcgtgccgccaccctctggtggatacatgccatctagtcggaatggtgccatttaccctgggcaactgaacatgaatgtgaatgtgaatggctcccagtttccagtggcaatgtcgcctcagatggcctccaatagctcgtggcaaggaggaaacatgccgcaacaatctccatattccgggtatgctacgatgaaccagcaggggatgatgaaccagccgtcctcaaacgcttcctcgccggcaatgaacaactatgccgtgcccaatgtgaccccgtatcaacaaaaccccaattggaactcgcctcctttccccacaaatttccagcagtcccagcacccacgaaatggaccgcctgttcactggcccaactatcctcatcagccaatggcttctaacatgccactcaacatgccgcttaacatgaactcaaacatgggctccaacatgggtcttaatatgagctccaatatgccgtccaatatgggcgcatatccttacgctcaataccccgggcagcatatgaatcctgctctccaaaattctgccggatcccacgcagcaatgcaagcaggatatgccaggtcacacttcaaccctcagacacgctcattcatccccggcggtgctcctctcgggcgtcacccgaacaaaagccaacacccaatgcagccgtatggtaccatgcaacctggcgcccaacagcaatggcatgggtatccggaaccaagttccaaccggactatggactcaacccccgctatgaattccaaccgagtgcccaccggtcctcgagactcgatcgcgaaatggggcacaccatctcatcttccccccaaacccccgccttccgaagtcccttccgactttgatctaaaaagccgaaccgtcccggcctcggtcccagcaccaacatacagcaacaatggaatttccgccgtcagcaatggaccacttgtggtctctgggggcacaactgtctccaagccgaactaaagcttcacggttttggtcacctttctactaccatatgtgttgtatctgtgatccttgtgtctttggaagttgtggagatatgaacctttgtcccgtagtctataggctagattcatatgtccacatgcggcaactatcttccaaggcttgcatctgcaacagtacaatgcttggcgatccgggttcttgtgcatgtacctagtcgctcttagctagtcatgaacctgttcaacttatgtttcttctttctcgcctatttggaggacatagaattcgaaatggataccttccaaaacagtataagaatcacgactaggatgtcctatatgtaatgtagccaaatgattaaaaggagaatcgacttatgcgatgaacaaagtacagctcaaaacaagatggactccagtaattaagaaggtcttaagaggtaggggaggagaggagaggagagaggaagagatttctagagcaagcatgtactactacatacaagtggctcctataacacgtatacatgcctgaggccatctgataatctgtaaaataaagcaatattcaccacaatatacaaattaccaacgataagaggacgatggctcccaatgtcaagcactagtatatctagttaccttgcagggcctttgttccaatactattacatcggccataaacccttggaaattttttggaagcacagaagtctccttctctgatatactgcgtctcgaatcagcagcgcatgttaagccaatctcagacgaaatgccaaatagtagtagggtttattatgattatgtgatttacagaatagtatagtttcaattggttgaaagtgatatcacgtgtttctcttcctattttgtcgagttggttgaagagaagagattcaatcagtatgaaagctactagttcagagtacgaatagctattaccgaatatggtgcttacttctcgagttgcatatatgcctaatcaaactataaactatcagacaaagaaacagcacttgaacccccagcttttcacatccaagtctttagccctcaatatatacgttcaagttccctcaaatatgaaacccccatcagctcatggaatatattgattcgtaggcggcttatactgtggcctagactgacgggttccaaagatcgcagaaggaacaataataacaaccataagaacaacagccccaagagccgaaccaaatataatccactcacgtcgacgaggcctatgacgcctaaccgtccctatcacagactgtgactccggatcttgtttcccgtctgctgcagactgtcgcccactttcatctccctggcctctgtctgcggctccaactgcggcctcgacctgcttgtctgtgtgtttgtcgtcgacgtattgattgagttccaggttgtagtcccggtcgctgaactctagcgtgcagtcccgatcattgacttgcaaggtgcagttctcgttcatgctgtgttcgatggttggtcggggtgggtatggcactgcgacttctttgtctgtgtcgggatatggggggcttggagcattttgccggagcgggttgtgtgtttcgagtgacggtttttccatttcgagtattttctttggctatacttcttctgacctggtaggagatcagcaaatgatgaattctggaaagtacagttggggatatcggggtattacatacttcacacaagaaggttgcggtgtagtaaagatgggtatcgaattctggacaacagaattaagcactctatattatttggccggatcacaggtctcgctgggcatggaatattgtagaagagaattcgagactttgattatatcccaagactataagccagatgaataaatggccccttgggcaggtcggcttggcttgtaacagcattcgcttagatcatatgctagcgagcccaactattgataactttgcattgaattttattgtcccttgattgtaatttctgtgtgcaggctgcactagtctgttacgccgagctgcagctgatatatcagatctggtcaaccgccccaggaaatgagcgttgggagtctgcacggaattttggacattttccagaagtatttggtcattggtgactcaataaaacctcaatcggaagtctgattgccagaagcaagttttattttggttgaggatgctatggattctcaaatatatagttcttcaatttcctactagcattgttgacataactaccaaaccacccagaaactacttagtatcaatagcgatgcaataaaggcagttattatttgcggtgagccctctatttgatcgacattgcaggagatggcgttggtaaggctgttgacatcggtatgatttgaaatctgatcgccaggcagcacaatcggcaaaatgcctagttctgaacgtggatcatattgactggcggggccttcaatcgtaacatattgtccagcagttgatgattgatcttcagatctatataaaggcccgggataaaaatgtggcgacgtccctcccgcagcatgactcgatatctgcctttaccggaacccaataaaccaaagaagaagtgcgaataaagaggtatcaaaatcttttatacagaggctatgtcacatgcgcgagtgcaaacggagacgaaaatgccataatcaacaggaagaagacagaactcctggtaagaaaaacaagtaaagaacatagtcaacagcaacggagtcagcctcgaagacaagaggatgatgcatcgagaacgccgatcaaagcccagaagagaacatctcccaaacagatatcagagatcaatcacccccggccgaggattccgaaatagaacccccacaaaggagagcactccccacatctaatccctcgactcaacctccgcttcctgcttagcgagcttatcattctgcttcttggcaagactgagctgggaaatcgcccgctccaaaacgtcaacaccgtccttccggaactgcgtaaccttcttcacgttcaaccttgtgagagcgtgcacaagatcccggccctgctcgcgctcgcgagccacagtgcgcgccgtcatggcgaagcgcatgtccttcggcccatcgaccagctcgaggatagcggtgggagccttgacctggggcttaggctctcggacggcgtttttagtacccttcttgggggagaaatactcgttcttttcgcgaggttctatgcgtagcactcgtgtgtatccacctggacggtctgcgtagcgctcgcggaggggaccgaagagtttggggagcatttcatgtggtgtctagggaatgttagtgttgtcattgggttgcgggttcttttttttcctccaaaggatgatggatcggtaattgcagcaattcatcacaaattcagtaaatccatgaattctcgtgaccagaatgattcctttccgtattgaaatcggggtgggcttgttctctgggaattcaacatacgtagaaaatctccaatgcacgtcgccgactcgcttcggtgttcttcttgcccagggtaatcaacttctcggccaggcgctgggcctctttggccttgggccatgtcgtggtgattgattcatgctcgaagagggaggtcaccaggtttcggagcagggcctgtcgatgcgcggagtcgcggctcaagtggcggtatctgcttccaccgccggccatgatgagggctattaggcgaaagtaaacgaggcagatagagagagagcgggttattgaaagtagagtgggaatcacgaggtcaatggctcactaattacaggtgaaggagagccctggaggatgttcggcccagaagaattgtctcggccaatcggagcgcttccaccatctgtccgacttcagttttccgcgctcactctgtctggtcgacgacattcagcttttcgaatacatttcacctaaacctattgattgccgaggacagcataggctataatcaagaaatacttgtaccatttgtcgcattttcaaaccactcccacgaacaaatagacaatccggcgactccaagcaccacaacaaatatgggcttcttcactggatttgtacgatttaccctcgaatatataccagaaagcaggactaactacaattcacactcgaatagctcggtggctttgcctttacctcatccgttctctgcattaccatccaagtacaccgctcaacacgcatatcacaacggaatgccatccacgcgcaagtcgagcaaatagactggttgaactcctctgctggtgcctatgacaggcgcttcctaccagaagacgtgccaaggtggcggcgtgaagaattggaagcgcagagacaagcggagccgactatgaaggagatatttaagcatagatggaataaagaagtggaggccttgacaaggaaggcctatgagacaagatgggaggatgtgagacatgctgccgcggaaagctggaaggctgctgcacgagtggtgaaaagagaatgaaggatcatttctgaaaactatagcaaaggcttggctcgaaggaatccttagatgtattatcatgtccgcttgttttgggtttatttttgagcaccggagtttggatacccttgatttagttatgttataatttacatgcattagtattattatttccccgagggatattgtgaatgcgtccagcgcatcctcgtataggatagagatatcaatgcggtccggcaagactcggtgatagcccggatcaaccctgggacatgtacactcgccactgaagaataaaaaaatgcagcaaatgcagcgagggcgggactgcagctgaatcgactggaagactcagaagttcagcttgtattagttgatgacggtgcagttgtcgtgacactatctgagtcgctccagatatccttgctttcccgctcgacggtgcgcatggcctgagatacctcctccagtttagcaacgacatccaaaacgccctggttgacccggtcaaagtaccggtcattggcctcgcggcgctttcgcgcaagacggatgtctttctcggtctcgtcatccaacgtacggtacgataccgaaccttgacctgcgctagcttctgtcgctgattcatcttcaatacctcgccgcgccaagctagcttttccactggcttcttcggcaccgctgtggccgggatccacaacttcatcgtctgcttcactacgtgcccaggcttgggcgagcttcaactgtttcatgcgtaaatcttccaatgcttcagagtgctttgcgccgaagacattctcgctcgtcacagcgctaagttccacttctgacaaagcgttctgcatctcctgccagatggcatcggatccgtcgacatcatgtttggaggcgcggcgtgatacaaagggtgataacaagctcgacttctcagtatttgcgctctcggctagccgagatgaccgattccgtttcaggggtgggggttggccagaggcagttgctaacggtgaggttgcaggtgggacgggtaaggagatattagaggtattgtgtgatggtgggccctggaaaagggctggaggaggcagacgttgagggtttggattcgtgggttttcttgacaaatccatcttcaacaaatgttagagagaacaacaaacattcggcatccgaatgaggttgatgatgcagctgataaggttatcgttatcggcgtgatgacataatcagatgtgggggctacgactgtctcgtgactcgcttagggctaagcgcacaaagtcacctgaggtgcatccaaagcgtgtggtaagggaaatccggaactcttcgacttttcgacaatcgaccctcagcccctttggccgacaacacccctcccagtcggtacgtattcgatatcctgctatttcccctacgttgttcgtggttttcggaaatcttttattcgtggcactgcgagatccttcgtcaacgatcgcacaaaaaatcggccttctccaaacatcgaacaccgaccgaaaatatccacaaccagcaaaacaaccgttacactcgacacgaggctaacatttttttccttgctcagttgaccgtcgaacacatactccgccaacatgggtaaaggacaaccccgtggtttgaacgccgcccgcaagctccaggcgcaccgcaaggatcagcgctgggctgatgaccacttcaagaagcgtcttctcggaaccgcctacaagtcctcccccttcggtggtgcttcccacgccaagggtatcgttctcgagaaggtcggtgttgaggccaagcagcccaactccgctattcgcaagtgtgtcaaggttcagctcattaagaacggcaagaaggtcgctgctttcggtgggttatcctcttccttactgctattgttggggcctacacgagttggaattacgacaagatggaaccaccaacacaaccaccacaaacagatgctaactggcatgttcttacagtccccaatgacggttgcttgaacttcatcgatgagaacgacgaggttctgctcgccggtttcggtcgcaagggtaaggccaagggtgatattcccggtgtccgtttcaaggtcgtcaaggtctccggtgtcggtctcgccgctctgtggaaggagaagaaggagaagccccgctcttaaacaactcgacgcgttctgttcgaaatcaaaaatgcagcgaccgggagccttggagtgtgggaacggtgccggacggaaagcccgcctcatcagcgccttgatttcatgagatattttctttttggggagtcccccggcgggcttgcgtccggaatgtggtggatccgcttatttgcgaattaaacacgattgatacaacctccaaaaagattatggcgccatgactttctatcactttcccgggtttctgaccttcctgtatactgttacttggttccttgatccttgctagagttgtctggtggagacgcaaagtaaagcgtagggtatggtgttgatgtgaacacagcattcatgagtgatggtctaaatcttcaatacatttgatctgtaccaacatgtatctatcccatgctctaggccttcaagcccatttacccgttgccgaacgtcatccacccgtgaacgtgtggagttgttcaatgatggcaatggccctagtagttatatatgtgtgtaccgtcttagtgtagctgctcgtggatatatatccaacctacgtgtagtgtggccactaggattccctcggtattaatctcgaataaactacaacgttagccccgttcctacatgagtcaggttatatcgacaaagatgcacatgaaggtctacgatccctttagtcttccgggaatcaaggattggaaagcttgaaggaccgagagaaaggtgcaaaaggaaaggtatgtaaaagaatcggattgattgccacttgtatgcttgcaggtcggctttatatgtgaatatatatcaatgttaccctcatggttcgtatggtctctacatctagtccaatcatagattaagatactctacactcctaccagtattcgatcggatctatatactaggcaaagctcaatcacataacgagataagcgagagtccaacatagcggctactcataaacattcgaaatcataaaacttagttccttttattcattactcctgcgtatcgatcgtcaaagtaaaccctcgggtatcgttcgggcaaatgtccctcaaaagatcttttattgattttcacgacctgtgacacaactgcctaaaccaactacagcttagaagctgatatcttctttgcggtagtggtctgagacaatgcggtacaggtatgatggagcatggccgccgctggggtaggaaaacaaggttagctttatggaatgagataagcgtgtgggatgggtgcttgaaacttacaggttagtaatgtaaagatcgacgagctctgcgggaacgtagtcatagatggggttttggacatcgattaggtcgacgagatcaccttcctcgtatgggaggaccttgctcgggtcaccgtattcaatgagtgagtcgaagtcgaatgggtagactgggctgagcttgtaaacaccgctcacgaccacgacgggggtctggtgaaccttggcggcacgcgcgatgacacgggtgccagccgcggcgacaaggccgccgttggcgaggacggagtgtgttccgagaatgaccttgttgactcgtgacatgagagcgaagacggcagagtctgggatgaggatgacggtgatgccgtgctcgatcagtggcttctggaaagcctccaagccgatgttgtcatcgtcagtgacagcgctaccgctgacagtggcgtgtgtgtcctcatggttattcggatacgactcggcatggatgacggtaaacttgcgcttcgcggcggccttaagcaggaatttttggacagtggtcgaggatgtgtgggtgaggatgatttcgttagagtgaatgtggtccagtgcataagcggcgatctgatcgtcgacctggccgagctcatcaatgatctcgccaataccctccagcacctcagctcgtacgtctttgcttggaccgtggccagggaggcgtccgtttggagaggaggatcccggggtgctgggaagtgagtgctcgggttcgggatgggacagaaggctgaacatagaggtcagaggggggcgagaggatctttcatcggaccggaaggagggcgagtcgcgatccaaaggcaatgatggatctatgaatctatgagtcactgcgttgatatttggaccaaaacttgggacccaccgtcataagcccggggtgtttggggctgactctctgagccaatatcgctaagggcgaactcagcgtcgcgatcgtcttccgcttcgtcgcgaataagacctaggacccggcgcacgatattgcccacaaccatctcgcgcggttgcgcagccattagtcgcctacccacactctgcacccgctcaataagctttgctgaatctgttgtgcggcatgcagagataacgcttcgtagcaaataggcggttgctgtagcacatgatcgcgaatggcggatttgacgtcgcttgagcaatctgattgaaatatactatgttagcgagtttgatcgtcggtaagagtagccgtcatgacaaggagtctggaaatacgtacgaaatcagagtctcaatagaggtatcaatcgggtttgtcttgaggcacttgaggaatgaccccaggcccggcgtcagggccaacgaggaagacggcatgaggaagtgggatgttgggaggaaatctacgcggtgtcagcgggggttcggcgacaggagtatgcagtgtcgggtaatagacataccaagtttcagatccagatcacaccgagtatgtaaatagaacgatgagcaagagattctcagattctcacacgaagagccagagagtgggagagacaaagaatgattttctgccgttcgatcttgtccgcttccccacactcattgatcctcgctctattgtctcggcttcggctttcttattggtgttttgccagtttttggatttcaattatttcatttccgtttttggattgctttttgtcggctttgaaactcgtggtataaaatcagattggagttgcggaagtacttccgaggcacgggtgacttggcgcattgaggttagaacaagcttacacctccttgagatccccctctttccttcagactgccatcacatccctacacactcatctcatggaccgctttaagtggctttgatgagtaactcacgatccgtttgccaatagatcgctgcgcccctgtctcccgtgacgccttgaggaagatgaactcactgaatatcctgtcctcgcgagtcattggccaatcttccagctcttcacgccacagatcgcagtcccaaagtgatagcaaacgtgcatctccaccgtcagacctctcgaaagtccggtcttatagcgaagataattttcggtcccttgaccccactgaaaagagctacaacgatagaccgctcgtggacgaagatggagaggaggatggtacatatgactcggacgagaagaccccgttactgcatgaaccccacaagaatggcacgctcactgctcgaagtacttggcgactgatttcccaacggtttttcgatgcgatcacggaaacgatcaagttcattttgtctacgtttgctgcacccggtgtgtatttggctcaatactttcagaccgacgatggccactactcgcttcttgcacctgtccggaaattgcgacgctccccatccgaccaagccatccggtcggctaaaggggccatccgggtagaaggtcggcgtcgtagtggctccacccggaagctccgacctcaaggctctcacgaatccattgtgtcaacaacgtcagagtccgacacagatcgacggtatactaaaaatctttcaagtgggaggaaccgacctaccaagacaaaaggccgcgatgcagattcaatcccagaaggggcggagcatgagcacactccccgtcggtctatacgaatcaagctccataatgaagaatctctcaagcggcagagacaacgaagatcccagagtgcagacctaggacatccaatgcccgagggtgtctctcgtgtccaaggggctgtccacctggacagcttaaagtccccaacctctcccaacatccaccgcataacaaagtacccacactctccaactccaccgcgcccactcctcccgtcacgagtaccttcatatactgcagctccccgcaatgccagacctccgcagaagaccttggtgcttgatctcgatgagaccctgatccactcgcttgccaagggtggccggatgtccagtggtcacatggtcgaggttaaactctcgatacccacgactgcttcattgtccccgggcggaccgcaaacgacactgggccctcagcatcccattctgtactacgttcataaacgaccacactgcgatgagttcctccgcaaggtcagcaagtggtataagctcgtcatcttcacagccagtgttcaagagtatgccgaccctgtcatcgactggctcgagcaggaacgaaagtattttcaaggccgcttataccgacagcattgcacatttcgtaacggggcatacatcaaggacctgagttctgtggaaccggatctaagcaaggtgatgattttggacaatagcccgatgagttatattttccacgaaggtaatttaggtttatctatttgggtgcgcttagactaataatcatcgctagataatgcgattccgattgaaggctggatcaacgaccctacggacaacggtctgctccacttgattcccatgcttgaagctctacaatatgtgacggatatccgggctttgttggcacttcgccgcggtgaaatcgagtcatgatcgttatccacatttgtgtccatgaatgtgcgcatctaggtgtataagggggggttttttttttctagaagcgatatgcaacctttaaacctgaaaacagaaaaaaaaaagatatcacggagcaatggagggaattggagaccgaccgacatgatcatgcaagcgcagttattcataatggcatccggcgtcttgtttgactaggaatggaaatccgtacatatgaccatgaactctcctatgaatgtaacacaacacataagaggatgatgtcctaaaatcccacggaaaccgccataaccttaccccctctggtactcgtgtcatcaacaggaagcttcgtcccccctccagtagtgatataaagaacattacgatatctctgtgtccgcccaaaagccgccgatgtagcagtcatcaagtccattgagcccttcaaacccgcgatcaactcatgatatctattaggaaaggccctaataaccacatcatcaacaagacccgccaaatacccaaccccatgcaggccaatagcgaagtcatcagcaagtatatcatggctgataacctcgtaaggccccaaagcacgaccggtatgtgtatcaatttgaacacgacagaaaatatgcttcgggctgttgctgtagtacatataatcgtttactatcttcaacccgttaacctcaagcaacaaacccatgtcatgatttgcggccattgtttcgtgttggtggatcactccgtacgtgccggtgcggatatcgagacgccatataaggccgagttgggagtcggttatggcgactgcttttccttcgtttagagcagctatgccattcaaatagtcagcggggagttttgcgatgagaattggctcggcgcatttctgtggtgtttgagatcgaccgtccagactgagttggatgcaatgactgcatagatatctggtgagagctccgtgataccatctgcgtcttcggcgccgtcaaaatggtggaccaaattggctgagctggggcctgatggaattgaagggtcaatttcccagagttctgctgtgctcagtactgcgactaggaggttgccgtcgggtcggactgcgatattctcgacccaggtcccgttaggggatctgtggatttcgcggagattgggagagtgggcgaggcatagagtgtagatgaaggtaagcagtaataatatggaacctaaaagattagccatatgtggaaggtgtgacacaaggatctcaaataaccaagtatatgggaatcattgccatatataggaagtgccagtttcccatttcgcaactcgaattaggtaggtttcccggaaaccgtggccatgtatgtagttaactagttacaaagtggtgcttggtaatatgctcttggctgcattgggctcagatggtcatacagcacgattggtaatatgctcttggctaaattgctgacagcagggcgcggagtttaccaccggcactccactggcactccactgcagcctgaatcagaatagtaagtctaggtatcgagtagtcctaggcctagatataagcgtcgatatctgacatgcaaagaaacagcacgtcgcagaaggggtcgttgggtgccaagttaaagtcccagcgtggcaggctggggcttttgctgagacttctgccttgacaagaccttttccttctctctcttggtctcctttgatggagtaaaaaaatatagatgtaagaacccaaagggaaaaacgaaccgtctatcactgtctgactgtattcggattttagtttgttaatttatgctttttccgggtgcctaccgagtgggtcacaactcacaaatataattggtgggccagcctgagctgccaatagccaaaagttaaaaagtcaagtcgggacccagtcaaagtcatgacgtacaataagcagcctacatgatgctcgaacctaatagtacatagatactgagcacacctctagagtcaggcttcttggcgcctaaggctgcagtcttgggggtttgaaaattgcagatggaagagccgtggacgaataatatctatatctcaatctctcgtcattctaggcgcgaatgacaattacaacaggtgatcagcaaaggatttgtctgtagtgcgtttttggtaactaagccatgcaccacgcagaatttcaactctcctctcctgctgtgacttaagcgaccccgtttctgtaaggttacatcttactatgcacaaatccctatggtgcatctcgtttgtaccttgggtactgctggaaaattgtgctaaatttgataacacgagttaagagacgaaaagccttctccattttcttcagttgacataacgacaatgtcaattcgcaggctgtccgcgtaccaacgtcatgccagagaccaaaaattgttgcgattgaatgagaatggcacgtttcaaatatcagtttttagtgacttgcatttcgctgaaggtatgctgacagactcttaccgttgacttgagatagtaactatgtaaagatgatatagcggacaacaagaccgcaggggtcatgaaatccgttctttcttcggagaaagtgcaactcgtggtactcaatggagatttaatctctggtgaggccacccaaaagtctaactcgagtctttacgttgatcgggttgttgcacctctactcgaccgtggtataccatgggcatccacctatgggaatcatgacagcgaggtgaatcttgatccagaagagatctttcgtcaagagacaaaatatcaaaacagcctaaccgagagaagggttctggaccccgctgccggcatcacgaattattacctgccaatatttccacatgaggcttcgaatgacactatcccagtatttatcttgtggttttttgacagccaaggtggtcattatgcattgacagaggatggggatggcgaatcaaccacgagacagaattgggtagatgatacagtaagtatcaccagggctctcacatgttcccatgcttgatccaaaaagtcgaatgcttggtcaatggacttggtgtcgagctttcacatactgacttgttgcaggtcattcaatggtttataaaagccaatgcaaacctaacgtccacctacgggcgaacaatcccatctctagccttcgtccatattccagttcatgcaatgcgcgccttccaaaaatccggcgtcagcccggtcagggaaccaggaatcaacggagaaagagtccagcaacaaggctacgatgccgagtccggctaccattctcaagacttcccatttataagtgctctgttaaacaccacggggttagcagcaactttcagtggacatgaccacgataatgactggtaagaaccatactgtgctatacattctcttctcaggttgaagtcaaaacgcaaaaacgcctcatttgactaataataatccttttcataggtgcttcaagtgggatactaagctaaatggcctcaatgtgacgggaaatggcatgaacatgtgctacggccggcatacgggatatggagggtatggcgactgggcgcgtggcggaaggcaggttttgttggataagcgatcgcttggggatgatatacagacttggattcggatggaagatgggtcaatttcaggcgatgttcatctcaatgcgacgtatggccaagatcaatatgggctggtgcagaggagtttcagcgggcaaaatggtggtctttctccacacttaaatgttctctatttgtggatttgtatttactgggcttatatgcagttgaactgatggtcaatggttcggaggactctataaatctgttgagttgggggactggtcatggttggctcttaggggatatgcgagcgtgtacaatttgttggagcgacacagttcaccttgccctgaggactagcaaggcctgaaaacatcagctgggagtataatggagaaaaaagaagattgtagcaaagctgtgaaatctagaggcagctattgacgtcgggatcgaatgcttatttatcattgggtgttttgtgctgtacgaagtacatatgtatcggataatgcctgatactctcgagacctttcctttgcgttttagtgctcaccccttgccgctttttggtcactgagtaaaactgagcacgtccctgagtatcctgaccgacttgatcacaggccattacgtaatcaactgatctgctcactgagcatcacctgatcatcccgtgaatacacggcgaccttcgtgctcctccgtactgtttttggttggagagctgagtaagtgtcctttgaagtatttggcgcatattttgttgaagtcatccagaagacattttactactggctcacaatctgcagaattggttctatttttctgtggacgtctctaccgctactgtataatgaaataactatttggctggttcaatgccttggtgacattgtagcttcctaaaaaagtatctcttttctgaattgactcactcgtctccaccatcagcccccattgccgccaacatctcttccgggcccgcagctaagaacatatgatgggtcatccagtgacctttctgaattgttgccaccgcgcgcggccgcatcgcctcctcgtatgctaatgttgccgactccaggttatcgatgccatgagaaatgatgtgcctcgccagatcgacgctatcatgcatagcattgttgactccatctccagttgggactctatagacaaagaacaaaagtcagaggtaaactctttcccgtggcgatccaagaagaaaaaggcacagtttagtatgcacttacgtcaaatgtacagcatcaccaacaagtgttactcccgaaacatgattccaggacgggattgcatcctcggccatggtgtataatggccatgagcgaaacttgccatcgcatgaccgcacgaagtctgtcaggtcataatcccagcctgcgaaatattcttgcagcacggtattccatagggccgatgcactcgcgaggatggaaccttcaggtatacttttctcagaaagccttagacccacagaaacgtggtacgacccatcaccgaggtaatataggaatatttgccgctctttgccaaaggccagataatttcccttccctgcctttgaggcagccaacgggtagattgggttgtcgggcttgatataagaagaaaagaaatggataccagaatactgcggctcggagggcataacctatgacaatggtattatcagccaggaatccgacacctccactgaagccatatcgaaattggagactttactcactgtcgctcgaatcttagaccaggcgccatctgcgccaaccaccagacgaaaaccagatctagatggctggttctcgaaatgagtcgtgacagatccattgtcaactctctcaatgcgttgtaccttgtgatcccaaagaatcctagacgccggaactgagcttagaagtaggtctcgcagatcctttcgatcgatctctggctcttctgtgtctccctcgcgggaatgagaaacatggaccttcccttgagaatcgactatagtgagtggaacaccaaagcgcgcaagggattgaaatcttggaaataagccggcttcgaggagagcggcctggccagtggtagggtgaagatcgagggtaccaccgctctgatgttcattcgcccacgtggcagagacatctcgttcaaagacaacatacggtatttcagcgacctccaagagccgtgcgagagtaagacctgccgggccagcgccgacgatggcgatgggtgactgtgactgcgtcatgttatgagtgagactcgaaaacaaagaacgaaagtttcgatgaagatgcagacgagaggatgagagatgacatacttatagatttattctacgtcagttaaatgccggaacttgtgatgtcggatgttagaacacttcggaagttactgtaaggtgttgcgtttcggagtttaagtccacggctcggaggttacggacccactctaaattcactttacttattcgcgaacttccgtaacctccgactttcctaacgcccgggattatttaccttcagttacgtccgacatcaaaatggctacaagccagggcgatgaggatactgccctctccaaatatgcttgcgactcatgcagatcaagcaaggtaagctccgcgttttcacttacttccgcgatcgagagatggaaacaaactaaactacctccgcagattacttgctcccgtgaacggaatagttgcgaacgctgcacgaagagaggaattccttgtatctactcgcgtgtaggcatcattcgtcgtgctagaaaacgcaagcacgagacacagcaggctagcggtgcaatcgcaactcctcggcccgcgcctgggtctgatgatggctcggcttccaagatcctgcgaagcgacggtcgcccacagtcatatcttgcctctgatattgaattgaccgaagaaagcttaggcggttctaaaagcccgggtcagcgaggtccattcaacgcgctgctgatgctgaacgaagccagtacagccacgactgttaacaacgagccaactgtgctggacagtgcgaggtctggaaagacaacacgactttcattcaagaagcactctatagaatggtcgaaaagtatggagttcacgaaaaccgtccactgcgcatatggttccagctgctaatgatgccattagtttttgagaacgccttgcgagataaagaacctttgcttagtccggcacctcctgaagtggtacgctctctgaaagcgtctcgcccagatgagattcaagaaaaagcctggttagtgatgtactactgcattatattgagagtcaccgacgctgtacatctcaaaagccagctgcgacaagagctctgggcctcactcggaaatattagcgtcctgatgaaaccgagcgacgcgaacatccaggctattctcatggttattggtctcgtaccggacttgatagacccctcattatgctggatgctctctacaagcgcctgcaggatgttacaagccctgggtgttacccacagaaggatcgacgctcagaatcgggaacaacggcggctgagattctggcagcttaatctcgttgacaaggcgcttgctgtcatattcggtcgatctccaattttccctcagaggatgggcattgaggttggtcttccgacattggagcagatccgaccatctacgcagcaccggacgtcagatggcagtaaagggtattttgcatcgcacctcatgtatcagaaatttctgctctcaaaggttatggcagatatctggcagtgcctctacggtgaaatagagagccaagatctcgaaatagagtcggtcattgctaacctcgaatcttggtatgaacaggcacacaaggtatgtctcaatcctgcagggtttgccttcaaatgcagttaatgacactttaacccgttgcagactcttgaagctactgcgatatctgaaaagccattttgcaatgcacaaaatgccaagtcgatagacatcggtcttcgcagccaggatttccattacttttatctgaagatccttctgtttcgaaaatccccaccccggcgctcccagtgcatcactagctctaaggaattgctcaacctgcttctacatctatccccagaatcagacgagccatatcacccttttctctggcaatttctatactctccattcactgcatttttgttgttatttcgtgacattttactcaaccccggccgtgaacctaaggacaatcaagaagctctggctgctatggagaatcttccggagttcctggaaaagatggcctcgcggaatccccttgccacaaggctgagggaagtttcaagagtgctcattggccatgcggagtctgcgttgactccaagtggacaatctcgagctggatcagatggtctagtggcagaatcgactttcacatcgagtgagacagcaagttcgttcgacatggatctattgtgcaaccaaaccacagatgcggcaagaaatcctttctgtgacttaaaaacagatgatatattcgaatcactcactcaagattttgagggaaatggactatttgactggatgacttggctgggtgagacgtgatgatatcatgcggatacaatgaaggccggaagacccggcaaagatgcgctttcgcaaagatagctctatgcagaatcacggtcctggttttctttcgtggacgctaccaggtcgacggcgctcaaattgagagttcaggcctacgggaaagtggtcatcgaaccggctgtcaacttaagccatacaccggcagctaccaaaaacagactcgttccgcaaaggtcatatataacacccacttagagtaaatatggcccatgagaaagattgagtgcgctggaccctatgagagcaacagaagggcagtacagcagcgagcgtggattgagctagaccgccaggggcaacgaccccgccttcagacgcccctgtctagaacattctgttcagatttatagtatttaacagacgccttgaacctaaaacatcacaagacacaatactgccaagaagcgaccgtttcagcgtaaccaaatacagattagcgtatactcgggtacgggccgagaaacaaagtcagtatgtctaaggggtaatctgttttcgaaatcgactgtacattgcagagaggatcgactgtagcatatccgggtatcaggcttttgatcgactggacttgtataagactgtatatttggtcgattgtaaaccagattgcgagcggcactaatcgaacgaaaatgacgggacgggccgagacatgaacccctgaaccgcccgaccgcgacgttctactagaccgcctaataattatgcccaggagtaaaaactcgacattgaacaaagtaacgcgcgttcttagctgaagaagaagacctagggcaagtgggtagcctaacatgaagcggtagcctcggaatcattaacagagagcgaggacccgaacgtgttagagctgttaaaggaacttgtcaaacttaggaaggagattagatagcgagatgaatcatataaggaagagctttgaaaggtcaaagaagagtttgccgcccttaaagaacagtttaatactgcccttatagaagtttgacacaagctatagaccctagcagatagacccgcgatcccgtaaccctacctcgagctatattcttagaataaccacgataagatcctatatatgtgtaaaggtatacgttatgcaggtgtaaggcctgtcaaccgggtaagatacaaagggctttgtggagggaacacaatgtatnnnnnnnnnnnnnnnnnnnnnnnnnngcaggtgtaaggcctgtcaaccgggtaagatacaaagggctttgtggagggaacataatgtattgatgatgtgccaagactaattcttgccagtctcggggtcccctgggggtcccaaactataaggaaatctatctgcctatgttcatgtgacgaacctcctttccttagagaagaatcggaggtaaaatgttcttgtaatcggtatattctgaccttctactgatggtatagattttaaaattggattattgaattagaaaagtcacaatttccggaatgtttttattgtttagggcccattgggcccccactagcctacctcaattcaggaaatatatgtgccacaatgaagaaattgagccattgaatttaaaattgcggaattcatacctgtaaggataaagctcatcatactggttgcattgatgtagcaagcaggctggttagttgacaatttaaagacagcatattatccacgagcttatactacatcgtgcttttgatattctacctgacttgtctgtaccacatatttgtttgtggctctcattagaatatatagcgcgtggatgagcatagcatgcatgttcattttccagactatgagcgagagcaattccatgtgagggcagtagcaatgctatcaacgaactaactatcacagtataaacgacccggtgggggctaatcccttctgggtatagtctgcagtaagctgagtgcatcagtgttactcactgattggacactgggcatcactgagtaatccgggagcatccaatgagcactcactgagcacttactgagcaacagtcattctacacgtgactgaactaagcatgatcactgatctgagtccgtactgacatctactcagtgagcctgagtctgagcaccctcataaaagcggcggcagatcaaataggaaagccccacacgccagggaaaatccggtacatatagttacaatatgtatgtacctgtgccttggctgttgagagcgaaccatatagatgttacttagaaaggggtgttgtctcagtcataggtttcagtcgcatagctcaaagactacgccggagacaataatagtgattcggtagttacttttcacaaacattaactctagcctatataaatctgtaagttgtggtcgcttatttccgtttgcctcggttttgcgggggagtttacgatgactcgcatgtcaagatccttgattccttggcgagtctcaaaagacaggtgggttacgcagaaaacagtctatgtagatgaccaaacccatgtgaaacccctggttttttcgaaacacagcccattcgatcgtcaaaagaagaaaactggctctcccgcctctgacgtcagagacccctgggcggccccactctttctgccccgggtccacggttgtgaattaccaaacgtccgaaaacggaaacattctagggcgtgaagagatcgcaatcaaatgaggttgaagaacaatatctcaggctaagatatcaatcacctaccttagtagctagggactctcatacataagctggcgtgaaacatatcttgtaatatgtgcgtaaatcattgaatctgaaagccaagaagcctaggttccttggttggatccgtcgaatagcttgtcttgccctctttacacgcgttgtatggcttggcatatgcatggtgaccgagaaagtggggaattaaataagccctagcccatccgaaaacaaagaccctatattattcgacatcatctgtcgctgatctgttgctgatctgtcgctttcactcactttatcccgtaataatatgataaattgacctgctaatgcttatcctacccagccatgaactgcttagttgactgcacgcatacaaacgacatcgggctatactcggctcagccagtggcgaacgatatgatagatctgctagttgatcgtcggtgaggtctttgcgaaaccaaccagcaaaatcttgctaccccacagaaaagtggataaggccctgaatcctatttttaacatggaacttttaggctgggggtcttctgctcatacatcaattattgcgccgcatccccaacccccaacctcctttgacaagcaaggtctcgccccatttttacttcgaatcgcgagcacttctcattttagattgataccatctatgattgatctaggccgaaatgcacttgtccggaacatggtctatccttaacggtctcatcacaacactcctcttttcaacgttaacgcctgcgatcgaattagacatcagcaataaacgtacgtcacggatagtcgaagctattttccgataaaagttgttatgggactgactccgcaatcattggacagaatcaatcaaagatgccgcaagtacgagtgcttactccatgttgggatggtatgccggcaacgaaactggacaaattcctggctctttccccgaaaaatggtgggaagggtctgctctttttcttgcgttgcttcaatactggcacttcaccggtgacacgacctataactctttgacgagccaaggactggagtggcaatcgggtgataagggtgactatatgcccagcaactatagtagctacctggtgagcaccatacatcaatttcgaattctcgcgacgaataaccagttctctgactattctcgaatccctagggaaatgacgaccaaatgttctggggtctcgcagctatgatggccgccgagctgaaattccctgatgtcccgggccaattctcgtggctttcgctcgcacaaggtgtatttaatacccaaaccgctcgatgggatacaacaacatgtggtggtggcctgcgttggcagatattcccgtaccaggacggatataccatgaagaactccgtatcaaacggcggtctgttccagcttgctgcgcgcctcgcccgttacaccaatcaagccaaatactcaaaatgggccgagaagatctgggactggtctacttcctcaccgctagtgaacaacaagacctggaatgttgccgactccacgcaaatggcaaatgactgcgccgatgttggtaactaccagtggagctacaactacggtacatacctgatgggcgctgcctacatgtataactatgtgagtggaacctcgatactcgctatttacccattacatgcgcccaaatcttctatttgcagacattaacattccacctgtacagacaaatggagatgaaaagtggaagaccccagtagacggcctcctcggcaaaaccctaaaaaccttcttcccgaccggcgacatcttcgaagacacaacctgtgaacccaccaagaagtgcaatttcaacgagatcctcttcaagggcctcacctcatcatggcttgcattcaccgcactcctagtccccgatactgcagcgcagatcaaacccaaactcgcgagttccgcacaagctgccgcgaagtcctgcacgggaaacaacaacaacacgtgcggcatcacttggtatcaaaacaagtgggacgggacaactggaatggagcaagagatcagcgcaacgaatgtctttcttgcaaacatgattaactttgacaccggcacgtttgggcccgtcacttccaagactggcggaaacagcagcagtgaccctaatgcgggtgaagggaaaggaggaggggatgacgttaaggagaagcctactacgagtggggataaggccggtgccagtattctgaccttgatctttgtctttacttgggctggaggcatggtttggatgatgctgggtgcttaatttggcggtatatttatttaattggcattttttcttagaggactcggagttctgaaggggacttgataatgtttgtacataccatctcgaaatcttttactcacctaaagcaaaataggatacccacgggtggatagcgtttggaaacggaggaatgaacttgaagacctagagtatggaatagatgattatactataatacccaggcatagagaactacaaaacatcacaggaagccgaattatgtagacagatagatcgtagatttacctagatcacatcaagtccatgaatggctcacaccaacaccatatctcttctttctctagctagctcaattcatggtttcctttcccttgtgcttctgatacatacccatccccggaagctcccatcgccccgaaagacaaactttggtctctgatgagcgacgccatatcactatatcgatctccccaacacccctctattacggcaccaccagcaagaccatcaactgaagggtattgctgagatgcaaagagagcatctactcgttcttcgtactcattgttctccgccacggatctaaatggcccaggggacttatagggccagtagccggtcattatcgtgtaaaagaccgacccgagactgaatatgtcaacagcctctgttgacacccatggtttggatggattgaaaaatcccgggtcggggagatgcccaccatctatatcaccaccatttgtcgatcctccaaagtcacatagtaggagattgagcttactcttggaatcagagtgtaatagaaaattgtccggtcgtaaatcggaatgaatgactcccttctggtggatatagtatacggcttctgctgcttgacaacaccacttcaaacgaagacttagatcaatatcgtcattatgctggtcaatgtaatcttgtaggttaccatcgctagcttcgtcaaagagtaatccacgcggttcctcggaggtaccgatatagctgcaataaaaatgttattaatatgtactccgtacattagatcgcgtcgtattcggctgacataccgtactatgctagggtgtgtccctaagatatcgaaaagtcgctcttcgacctcgaaactgtgtttgatatccttgacaaaggaggtagcgtctgccgtatcggaatgccaccatgaatatctagggcatttgacaatgacccccggttttagtcttacgatcaatgaagtcgaaccttgggtcaaggctttaccgacagaaggttcatagatgaccggattgcctattcgacctggcaaaatagcttgattttcttcactttctcccaaggcctggtttttggcgacagttggagaatcattttcggatatagggcgtccagaaaagaactcgtcaaccttacctgccaatccccagctgattttgtacccatttgcgccggcaccgtagcaagatatcaggggaagagggttccctggtttcaagacaaaatgaagtccaccatgtctcatagggcgccgagcaacgtagacttgtctcacatcaaacccattggtcgcagccagtccatctgcctgctcgtcaaccatctcggggcatagaattctcacccttttaagaatgacttcagtcgaagcatcgtcgatatcctcagacctaacaagtgttagcgtcactccaacctcgggaataattcaaaacataccagttattaggctctttcgtgccaccgataacagtcccaccacccagaggccggggtatgataaccgtagaggaaccatcactccaatgatgactgatagttctgtcacagtgattcgagacgatgatgaactgaccccgcgaggggaaagagtcaggatcattaaaccccctcccacttgcatcaacaacagccgaaacgtgatcaatctcatcctgggatgtattctcccgatatacagacacaacctgttctaggtccgtcaaatttgcgcgaataaagcgagtcccttgcgcctctgcgcgtgtctgtaaccacttcaaataaaccggcgagttcaggacccaactgcggtatgaaacacctagctggatagatggatattgaggggggtattgggtagggtcgagaatctggaagtccggccatgtagtgtagccattttcttctgccaggaacgaggtcgcgtcggctgtatcgaaatattcgactgcgggaataaaatccacccccgcttccgggtgatgtttcgcgatcttctcgaattcttggtaggtttgtcgcatccaggcctgttctcttcgttcctcttctgtttttgcgggggtggggcggaagtgtgcccctgcccatggggaggcgtagtcaatgccaacgtcaccgggtaactctctcgcgatgacggtgattttcaagtattgggatagtttgactgcgatgctgagaccgataacaccggctctgttgaattgcagttagtaggcagaaaaaggaaagtagacttggctctcacccgacgatgataacatggccttgactcatgttgattgttctttgtctttacggtagtccaaggtctaatgattgttttatgaatgaatctatgcaattgtccaggttcagatgttgcgaaatgagtcatctaaattcttcagggccgacacggccgcgggggcaagtcacaccgaacagtcatattgcggaatttgtggctgtcgaggggcaatcgaatcaaaccagaatggccataaaccacctagacattgttgtataagagaatttgttgtggactattttatggtaacttcggctcagcagctgtgtgacatagtttaaaaagcacacatagtagatatgagggaaaaatgtacaatgatctcctcaaagatacatcgccattgcaataaattcaatttgtgacttccacgcgttaagcgcgacgcgaaagcggtgtggatttgaatggattcgccatcgaagccccaaattcacccccgcatcgcagctcccacgtctagatatggtcgcaattacacagacagacagccagcccgacgctgtagacgaggaggcgaattatgtaaacgagactacagctctcctagggaccagcaagaccaagtatgctgacgcgcgcacgtcagacacactggacagttcgccagggccagatagcgacagtgacgacgaggaaaagcccttgcccaagttgcagattctgctactctgctatgcgcgcgtagtcgagcccctggccttcttctccatcttcccctatgtcagccaaatggtacaggacaacgggggcgtggcagacacggacgtcggcttctacagcggactcatcgagtcaatgttctccctaacgcaggctattgtcatgatattctggggccgagcagccgaccacctcggacgcaagcccgtactggtatcctccttgttcggcgtgaccgtggctacaggcctttttggtctagcaaagaccataccgcagatgatcatgtttagatgtcttgctggagtttttgctgggaccatcgtcaccatccgcacaatggtggccgagcacagcacgcccagtacgcaggcccgggcgttcagctggttcgccttcagtgggaacttgggcatcttcctggggcctttattgggcggtgcacttgctgacccagtacgacagtaccctggagttttcggaaatatcggcttcttcgaaaaatatccctacgtgctttcgagcttcgtggtggcgttgatcggggccaccgctgctgtgtctagcgcctgctttgttgaagagacgttgaagaaggagccggttgtcgtggaccgcgatggcggggaggcgacatccgatgcgctgaccgagagcggtgacctatcgacattgcagcttctcaaatccccaggggtgggtatggtcctatacacgtacggccatatcatggtcctcgccttcacttacacggccatcattcctgtcttttggttcacccccgtaaacctcggagggtacgactttacccctctgcaaatttcattgatgatgggtctaaacggcgcctcacaggctgcatggctcctcctggtgttccctccattgcaaaggaagatagggtcgaacggagtgatacgtctctgcgctttggcttatccgctattcttcctactctgccctcttggcaacgtacttttgcgggtggacacagatggatccgttaaagccttttggattctcttgccgctcgggctggcgattggatgcggagtcagcatgagcttcacggcgatccagctcgttctgaacgacgtctcaccctcgccgagggtattaggcacgctgaacgcactggccctgactggttccagtgcgctgagggccttctgtcctgccctctttaccagcctcttcgctctgggggcgagaacacagctagctggaggccatgcgatctggatactcctgctcatgcttgcttcagggttatctgtcacagcaaaatatctaccagagccccgggccacgggcaagcaccggaacagccaggcaaggtgaggatggttcgattagctgaattcacagcacgatcaagacttcccagcgcgcacctttggaggaaagccgctttttcgcataggatctaaaatttgcaattgtctccaaaatttgtcatgctcgatgatgcctgtttatacagagaaaattcatatgtacgcattatttcttttaccgattcgtaccccgtacatacaacatattagagtatatccttttaaaaagttaaatttcgacaaagggattatttatgaaagatccaaaggaacatcagtgtgttatctaacgtcttttaactatatcatctagacctaagtcaaccggatgcagctcaccactaccagatggtggtgtttcgtctcagcttgaatataatcgcgagcaccacttttattacgcttggacctcggtactacagtctctattaaacttttggaacttcctaatcatggtctgatctagaagggtttcaatgtcactattcgatgcttgccctcgataatgaattgggaaagggacatctcattctatcggtcaagaacccatcaaattattcatccatatgttatatgtcttctgttccgcaaatccttttatgttgtttgttagctgttgtgccatgtctcggaaatctcaatggttttcttggcatcgaggaccttgagagggtagggctgggcagggcttggcgggcttggcagtcactcgcataaaggtttactgagcgatatattctccatccaatcgctttttttaattccccaattccgtcaaaatgctgcgtgaagcattttttatattcatatgcgtggcatgggcgggatttgctattcatctctcgccgtggttgaaggttagatcaatatcctggaactatactactgaggactaacgtcgtgtagggcatctcccacggagttgaagcttacaatgctactgcatttaattacccagtgccattgtctacacatgatgaagagcacacgcgtctactgcagaatcttcagcgatctagtgggaaatgggactctacccaccctcgacatcggttgttaactgccctacatggatatacccgctacaaagacaaaaacctggcggaggtgactcgatggaggaatctttacaaaaatgtcccaaagcagcagagaatagtacgatatttctttcctttcctcttgtttttttctttgcgggtgttaagtgggtttggctaactggcctagttgctcgaatcaaccatccactacacgcgtaaactcaacacaatggaacatcttcttgagacaaacaacgaactcgccagatctattgttgaccacggcctttggttctacaatatcagtcaatccgagctggacgaattcgtcgaagaaagcgagagtcagcagcggtccgctgataagactagcgtctcccagggaatgaagcattttgtgcgtgactgggcagatgagggccaagaagaacgtcaacaatcctttgggtgtatcttgaaatcgctcgcccagacaccacgggcgaacgaaagacccttgcgagtgctgttgcctggggcgggattgggaagactggcgcatgaggttgacaatcttggaggtgagtacataattttctatctggggaagtctcattggctgattggagattaggctttgaggtcaccatgaatgaatggtcaacatacatgaatctggcataccgttatgtgtccagtcgctcagcccctaacagtgaatcattccacccatatatcgactggtggtctcatcacacgacgaccgatgatctccagcgctccgttacatttccaaaccaagttattcgcccatcatctgtcttgctcatagagggagatttcactacggtattcgaagaacacacaggccaatacgacataatcgtgaccttgttttttattgataccgcacggaacctagtatcttaccttgagaccatccacagacttcttcgtcctggtggccgttgggtgaacctaggtcctttactgtatggtaccgctccatttgtacagttatcactagacgagattgtggccgtgagtgagggcgtgggattcgagtttcaggaaacagatcccacaattggaaataccacgttgcctgacttgcgagtgcgaggcttggaggtggcatatggtcgaaatgagcgcgggttgaataaaaatgcatatcaggcgcagtattgggaggctgttaagctctaggataggaatgaaacccatttcatatttgctgcgttctattacactctacaacatagcaaagtagctgtttaataccagaatatcatctgaattcaacctggttggttcaaaaacgggaggcatcatacgggatagggccagttaccaaccccctgtgttgacacacaatatctcgtgagttatccacctaatttaaccgatgaatgaattcgtttgccatatccaatatagtgatgccccttttgcctcagcccacattgactagctagcacagacagcatctcggttacaaggtttccggtgatgccgggaccatagctcagcaatatcgaccgatagtaaaggattgtcacgttaagcgaatggagtattctggactctaaatttacactaaaaacatggtatttttcctcggacaataaaagcatcaacacttggcaagctgggatcggcagggactgtatgctctgaccttccaagacggccaatgatacacccaagaaaagcaaagcgctcattaataaagcattactacccacatgcaccaccatccactggaaggccaattatatgttcaataccatgagacatcccctccgctgccaaggctatttgagaacctttggggcaccaagacttccacttgtcttggcctcgcaaaatactgctctctcggcggaatggcaggtataaagggtgcagaccctgtgcagcggatctctgaattcgcaaccttcgccatcgtcattacattgtgtacagccctcaaatcacctcgccacaatgagattctctatctttttcattgcgatgttgacttcggtcacatccgcggcctctactcaggaccccggtccatctcctactgcctcaattggctgtgagcctcacggagaccactggtttgttctaccccatcgtatgatgtctattacttgagggcacttattaacactcttctatataggcactgtgatggccctgcctcaacagccgtctcctcggccatctcctcggttacatcaacggcaagcgaggtcgaagcgagcactacttctgcggaagcttctccggcaagccccagtcctaccgagtctattggttgcgagccgcatggcgaccactggcactgtgatggaccggccgagacgtctagcacctccgctagcacctctacgggtacttccaccagtgagtcggctagtgcttccgacagtacttccgacagtgcttccgcgagtgcctccgcgagtgcctccgcgagtgcttctgccagcgctggaaatgaggacagcggtactggagcaattggagtgcaaatttccctgcttgttggattgtcgcttgttgctgctggtctgaatgtttgagtttcgatgactgtctgtgactgtctgtgtgtgtgtgtgtgtgcgagtttgttgctattgtcaaggcgaccctctcaaagtacagtgattttggaatcaatgcattacctatgtaaccctcgaatgttaaaaggatttatataagccgcgtatccctagttaactagttagttagtcatagtcaactagcgaactacctagctaaggcccttttcatggcaaaatctgcggtgattggcagttggaggtctatagggcgggagatgtcgaaattcttagtttgtcgccagatgagatttttgttagaagctaggttctacattactagataaaaaaataatgtagcgcgaaacgaacagtagctcaaggacaagaaggggaaaatgggcgaaatgttagacggtatggaacctagtagtacatcaccctacactaacagcatatcaaccatcaggattgacatattttcgagtgaatattggttcagtacattagttcattgttgtgatcaaggtgtcaggcttttctaatgctttttttttgcaacaaatgatgctacgacctcccctataacctacgcttattcgatactagtagaccatatattgtaaactagacgatacacgaccaatcaaaaatacgagtgaagcgggtcgcaactgatgacagccacagctatcaaaggagttgctacgggtagcaatgtgaattgagagaaagacaagtgaaagacttcgatggaggaatttcttttttttttgctacgtagaatattgaatacagaacgagtgtgggaagatccaggatgagtaaagtaagtatgtatagccagttcgagggtgatgtaaacaagacggaaaaggaaaggtacagctggattcccggagaaggagaacgatgaaaagaacagtcggaaaagaataaatggacttaacctccctaaggttccagccctagatcctatcctaatccagtgacccagaaaatcagaaattgaaagttggtttggttggcttgtaaaaaaaaacgagagcttcgtgagtagtaggttacatttaacaaagaacaagaccaataatccagaacaggagagggaataaatcctgcattgtacgctgcaagaggggaagagggagagagatccaggtacagtaagaggcagagtagaggtaacagcaatagactctctattcctgtccaaagccaagcgtttcctccaccgcaatagacattttgtgctcgagagcatcgtgcgtcttgtaaggagggagatcaagacggttgaagctgtgttgaaataaggttagctatgatagaccagatataaaaccaggatcggatacataccaagtatgcgacttgggcagcgcagcgggatcgccagacttctcgatggtaaaccgtctgggaccatcggatccctgcagatccttaaatccgttgacaggaatacgcgaggtaccagtagtgaactggagaagacgcgacttctgctcggcatcccaggtgcggacaatcttccagaaattctggatgacctcgtcctgctcttggtagccgcggtaatcggtgtgcttcttccagtcttcgacgtcgatgtcggcgataccaccgatgagcaactcgagttcgcgctcgtcgaagacgttgacgagatcgggtgggatgagctcgttgaagccggacataaaggcgtcgaactgctcctcgactcgcttcatgatcttccattccgtaaccaacctacgacatgattagcggggttttatcatgataaaggctgagatttgttccactcactcaatgtactgtggcttgttctcgttggtgacgggaatatcccggccaccgggtatcaaatcaatggtgcgacgctcgccaaacttctcatcgtcaaccgaaaatgtgagttccacaattccgtcaatgtcattatccctgtcatggtgttaatattgctcaaaatagaatcacgtaacaaactcacagtgtccatgccaaattccggtgcagatcctcatccacaccttccatatcttgaagactgactttcttgcgcaacatcatcttgtagaaagctccaataaagaaggaatccaggaaacgacggtggaagatagccagaccaaccactcggccgatgaacttgaaataattgagatgctcggggttcacgcccgagtggggattaatctgcaaggtataattatcgtgggcagagtactcgaagagacaatagaaaggattgaacatttcatgagagaggaggaagaagaattcactgtgagagttagcattttgactgataccggagaaaagaagaacggaacataccgcgaaagaccaccgtagtcgagaccatcttcgccatcgaacttgatcattaggcgcttcttaagatcggatgcgctctggcgcataatttcggcatatgaatcctcgaagatgttattacgacggactttaacgtggcactgtccggacataatgcgcaatgcgggttgggaccggaagtagatcagcttgcgccggaagtcacgcttgtactggggcacaccctgatccaaagaggaggggagtcgcggatcatcccatgtagttgtcttggtgttgtggtcgacgaaatatacgcgagcagtgttggtaagacgcatctcccagccgctgggaagaggacccaattgggatacgggttgctgttgaatggtggtgttgttcgcgccacctgtggtctgtccctggccgtacatgcggatgtactgctgccgacgaggatcgacccatgttgtcgtgcgcgtgttgtggtccacgaagtagggccgtccctcgggcgtcactcgtcgttcccagcctggcggaagctcccctgtgcctgcagtggtggctcccgtcgccatcatggagatcgcagcagcgttagacccggcgggggctccagttgccagagaggttcctgcgttaggtccgggtggtggtgtaggtgcctgctgggcatcaggcaggttgggtgaattggcgccggtccgatcttctggaagcattcggctctggtgggcccgacgttcgagctgcatgtttgcttcgcgctgagaacgctgggtatgctcgttatagttggccgatggtcgtgaccaggtcgtggtgcgcgtattatggtccacataatatgtccgtcccaaattgtcttcgcgccgttcgtatccggcggggagtcgaccctggctgtcctcaaaggagctgagattggcgcgagatggggcgccaggtccagggggattggttggggcgccattcgacgggggaggagcgccggctggaggaccggtggtcggagtgcgctggggcaatgatgaacttgaagctgcggcaggggtcgtatcggtattgttggggccagcctgtgattgagctgttggtgctgcaacctggggcacaaggccgctggaagtcgatgattgagcctgttgacgctgaagtccattctggttcggatgcggggcggtgaggtttgacgatagattgatgatcaattttccgtgaaccacgaggttgtcgttcgattttttcagatccctagtaagcatttctgtggggggcacatggccgtcaggtcagcccacgtttctctgactcgcgatcggcgttctgcggacgtaccatcaccacccatcgacaagtcaatgacatcgccgatgcgaacattgatgactccgaggaacccctgatccttcttcttgaatttcttctggtcgaagatttgaatcgcaagaatgctgtcctcattgactctcctgtaaatatccatggttaataaggttcaccctttcccctgacagcgggcaaatacgtacaaatcgaacggctcattccaatacggattcagagtcttcttgatcaccgaagttgtatgtgtttgctctcctccaacagtagcgacggcgaatggatcggggaatcctagaaagaggtggtcagttcaaccccgcaggactcgatcaaccgatccgaaggagacgacatacggaagacatcgcgtttgtacaagccgtcagccgcgataactatatgccagagatgttagtcttgtacggatgcggaaccccgcagagtcccacgatgattcgacggaacgacagtcttacttgtgacccggagatttggctggctataatgcatgttagcgatgatctgaagatccagattagaacagagcccgaggcgagtccaacttacgctgggagatttgacgccatgatgctttacaagcgccgatcaatcacgcccaaagaacagcgcgggcgcgcacattcacgagggggagaaggaccaaaccgagttcgcccagggtcaaagcctggaaagcgtggataggttggggatttgcaggtttggtgatgggtggtagtagtgttaagagaggagaaggaagagaaagaaagggttaggcgttaggtgcgcccggggtttgtatggcgcaggtactcggactacgtattcactatgtacgagatacccggtcagtacttcctggggctgagcacggtagatttctaacgttgaattataatctcgctatcattttactacataagcccatattgtatagccctagaaagtcatattcaattttttcccaggttaccttctaagcatacgtaatagagtaaatttagcgggtgtgggcgggtagagtggcaatttgatattaataggatggtaataaggaatatcacagctatgccagctaccccagctatcctggtaagagttacggctttttgtttaggcaaccgtatttagatgatgttcgaagttctttatatgccgccattggtactatagtatgtaccctgtacttgtaccctatataatacacaacccttctagttatacccccgtgtacattaaatacaactcccaaagccaacaatagccaaatctcatctcgtattcttttttttttttgctaattctttgcccggaaattattgtacagcacagttcccacaactccatacccacacatagagaaaatgaggagaggattcagttccggtcctgaaatcggacaccagacccgggatttccagaagcacgctcaaacaaaacacttagtagggcgagaaaccacggcctcggccccggtagggagcaccaccgcgatatccaccaccacgagggaagccacggccacgaccgcggccgaagccacgaccacggccacggtgcatcccaggcaggttggtacgcttaggcacgacctgttattcgacataagtgagtgtaaagagaataggaccaacatttataaaccgaccttcaagttgcgaccgcgaaagacactctcgttcaacaccagagcctgagcgactaggctaggttccgcaaattcaacataggcataactgcagcgccttgtcagctcatatccatatatattccagtccatctgttcagatctcaccctttgggctggccagaaaacttgtccagcaaaatggtaacccggttgatggaaccacagctctggaaatgagcctgaatttcctctggcgaagcaccgtagtcgacattgccgacgaaaatgctacgcgcatcaatatcttccttgttctcttggaggctctcggtttgctggtcgaggtcggcttgcatctcccgcagcttggcggcctcggattccatctcggccactcgtcgcttcatggcctcaatctcttcctgtagggatcaatcatgtcagcggggtatgccttgtatatgagaaaaagtatgcgacgttggtatgaaagaaatgacccaaaaatctcgaacaaagagtggaattgctttcaatgcagcggaacaaccctacctcgtcatctgcaccatcttcctggtgtggaatctgctccgccttgacctccactggaatctcctgaccttcagcagccatcttgtcggtaaaaaaagagaagtgttaagttgagggtattcgaagggtcggtgaacgcgccggtaataccgatgaggggagcaagtcagagctctccgagggtcggtataatctttacgcctcaaattttgtatatgaaaacgaagggattgagttgcttgaacttgggaacggcccaggtgatttgtacgagttagatccctctgttcaagacctctaggcggcagagaattgaagttctggggtttggcaatgagaggctttctatttcgggaatagcgcctttccgacgataaatcggcatactgccgggcggtatatacttccagcctcacttgacagggttcacttcactaaatgtcagactgggatatggccctaggccttaaatagggatctcggtttctgttatggtctagtggtaaaataagctgtatattttccacactaagtacaaacattcgccttttgaaaagtggagaaattgagtatctttgtatggcaccgcctgtacaaaagtacatcggcatgatatttcaattatctgaattcttcaccatcgactagatagaacttgaaaagaattatcaagtggaaaagttatagaccattggtgtttatggagtcctgtgtttgacatgatcttgttcctctccattgaatgttagtttaatcctagttcaagggtgcagaaattcggaccatcgagttatcatgcctatgcacatgttgcatgtgttgaaagtttgctagataagcagaaactccatggaccaggagagacgcgcgagcaagacataagagaatcacaaaacgaaatcagagcgagggattcagcccgtaagaatagatgacaatatcgtagcagattttgaggaaatgactcaattcaaggtatcatgtatcaaattgaaaaagcatgagatctgctacaagtcagaaggaaggagaagaacgtatgatcaggcgaacaccaaggcaattatgtacacggatgaggggaaaagtaggacaataggcataacttataaggacggcatcacgaagccggggggtggttcttgcggaaggagaccttctcaacagcgacattttctaccccattggcgtcggtcttcagctgatagacgtacaacacaaggacatcaccttggatctattcggagtcagcatgtacactatccttcaaatcaggcagggcaacccacgtccatgaggcagaaactcggtgtaggttcctcgtcatctggccagaagcccgagctcatagcacccgttgcgcttcccgggttgataaagaaccgaccctccatctcaaatgcctcgaagcggtgggtaccaccccacagcaggacatcgacatccatctggcgggcggcaataagcagtgcctcggcgtcggcgggtggcacgatggtgtggccatgggtgaacccaattcgtaaactgccatgggtcacgatcttagagagagcgaggttgggagaatcgacatcgtagtcacccttgaccatctgtaggtccggggctacctcgcggaggaaatcataggtctcgcgatcagtcaagttgcccagacaaagggtctggccgatcttgccaggggtcaggagtttgcgaaactagaatcgagagtcattatcagcatgctggagtagattgtgacgcaaaagacagacggaccttggctggaagatcctagacgacgtgttagcggagacagtgaagctgagctgaggacagcttacaggagctcggtcagggatgaacaggtcaccaatgaccaagaccaaacgggcggtcatcctggatggcgcgtgtggggtcaatgaagatcaatggtccatccacggtgattggaaatcggaaatcggagcaaagccagaaagaaacaacgcctgttggcttcagcctgatggagcttcgcggggaagagcaactaagcaatgccctaagccctattttatgtcctaatatggctagcgctatctgctctatgaagccatctcgatcttgattttctttcgcattggctcatcagaccgaacgtctcgtccgaaatgcttttcggtttgatgaggccaatcacatgctacacctctcttcgagggtttactcttggtggaggtcgccggaggagaatactacattggggttcgacaatcgaatagagtagcagttgccgggcagacatcggcatttggatttgatattatatagacattcaacgagagaacgagtgtagtattcgatactccaatctccaatatatgtgagtgaacagtacggagtacagcatatatactccgggatgatataaaatgacaaacatcctgcagaataccccagatattgccccatatccccaaataccctctatagaagaaatcatacggcgtgagactcagacggttggaaatctcactcggtaggatccgcccggccatcttttctccgacgtcaaaccccgaaagaaaaacagccatcttcggagacaagactcagttcatatataacccaagtctcacttcgcacgtcctcggttctatcgtccgagtcaacaaatcatcgaattctcctcggaatctcggccaatccactcggcggtgatccccgaaatccccttaccctcgggaactcctccaatcccctttcacgcgaagaaaaactaccccgcggctcgccgcaatcggaaaactggcgtccagatcgcctacggagcgtttgagcctgatttccagacacctggaccagcgtctcccattgcctgacctcaatactcccttctcgaccgaaagaaattcactatttcccgacgacatcgaatataaacccattgatcgctccattcctcctgcccctctctcatcaactcccactatgtctattcaaacccctcacaacaccctcctgatcccaggacccatcgaattcgacgatgccgtcctccagtctatgtcccactatgcgtgagtcacaatatactatgctacaatatacaaccaactaactctcccagtgagagccacgtcgcccccggcttcgtcaaggtcttcggcgagaccctaactctcgtccgcaaggtcttccaatctaccaaccccgccgcgcagcccttcatcatcgccggaagcggcacactgggctgggatcttgtctccgccaacctgatcgagcgcggggagaacgccctcgttcttaacaccggatacttcggcgactccttcggccagtgcctcgagacatatggtgctaacgtcacccaccttaaggcacccatcggcgatcgctcttcgctcgaggaagtggagcaagctctcaaggagaagtcgtacaaggtcatcaccctcacacacgtcgacacctcaaccggcgtcctttctgacgttaagggcgtggcacaattggtgcgccgcgtcagcccagaaaccctcgtggtcgtggacggcgtgtgtagtgtcggctcggaggagatcgccttcgacgagtgggatctcgatgccgtccttacagcttcgcaaaaggccatcggctgcccacccggtctcagcatcgtcatgacatctggacgcgccatccaggccgcccagtcgcgcaagaccccgcccagttcttactacgcctctatcgccaactggctccctatcatgaagaactacgagaacaacaaggcctcttacttcgctaccccacccacccagctcgtccacgccctccacaccaccctcacccagatcaccgttgatgtccccgcccgcttcgctatccacgccaaggtctcggataaggtcaaggctgctgttgccgagcttggtctgaagcaggtcgcttcccgccctgaatgccaggctcatggcatgactgccatttacttgcctgagggtctggttccggctgatgtcctgcctggactgcttaagcggggtgtcatctttgcagctggcctgcacaaggagattgctactaagtacatccggttcggccacatgggtgtcagtgtcactgatcccaagcgtggtgacattgacaatgccctgacggcgctcaaggaggctctaaccgaggccaagcaggctaagggtctgtaagggctgtactccggtagatcatgtaaataggatcactcagacttatctagagtaaaccttgtagatcacttttgggtaaaactactgcaatgaattattgattattgataatgtttgttatatctcagtttcagaaactaacttgcatagcatcatgatcctgtgattttatggaagctcatcatcgtatagaagcatcaatcttcctcttttacctaccatgatatttataattctacctacagccctgaattaacaagaagcaaaccttctaatctgcagctacccgccaatcctccacattctggaatcctccctattggcgagtctaaccaggcccaaggcactagccgaagaatgcaccagacttgtagggatggacatgaacaaccagtcacagttaggaatgtaatattgtgccaggaatcactcctcgcagtcttatattttcccttgtcagctcctacttagtatcagagaagccggaaatatgccaagaccccctgtaacacccctagacagcaatgcattgagcaaccctgtcttgaataaaaacggcggatcttcaatgtttcgcgtagcactatggtgtggatggttcctgcatcgctagccaaactagggctatactttcacatggaatctccttgtggttttcgatagggttatgcctgagatgaaggtgaaggtggtaggagtagaatgttatgtcttttatagaatgtagcagtagacttcattttatttgcatgtatcccctatatgtatcatccataaagtagcgaagcgttccaaccctgatcatatcttgatataaaatctatacaagatgcattacttgaaacccatcctcccatttattctagcagccgctactttcgcctcagcagccacaacgacagccacactagcagacaatgcgatgaatactacatgtgtatcagacaagtaagttgggtcgatctgcatacgcattccaaattgagcccagatactgactatctaaccaaatagcattctgcagcaatgcgtccaaccaatgcaatctaccttagcaaactgcgcaccggacgattggaattgccagtgtactagtagcacaaatatcctggagtaagtctcatctaacacctcgacaattcctaaaacttactctatacgccaccttcgcgcatcctaataacacattgacactaataccacctcagctgctatgataactgtcccaacgacacatcgagaaaggacgccgaatccatgcgccaacaaaactgcgctaatgctaaagcacatgtgccaacatcaatatcaacagctgcatctgctataagctctagtagagctgcggctacgaggagcactgacattgaggacgaaacggaaatttccgactctgaggccgagaatgagttcaaggaacatccgataaagcaatatagtgggttagaggctaattcgatcccccgtccagaacagggatctgcttctgttttgaggatgggtggttgcttgagttttctaggtcttgcactaagtatcattctttcgttctagtgttgtcttcaatattactgtgtgttccatatactataaataccgtcctaagcctactctcccatgcacatattgtactttatttttttcgctgacattttcttcaagtaacgcacgaactcagacccaaagaaaacgaaccagaaaccattgtaacaaactgcacagtagtaaaagaaaacaattgcccgtctcataacgcgctatgcatcatttccgaatggctgaacaacttcaatcccgtttcttgtatcttcgactgactctccggcaatccagcatagaatggtgacccagtcgtctaagttattttggataccgtccttaaagtccatgattcgcgacgaacgaatttgaagagccttggggttctgcttgccatgccagatctgaaggatacggacttgaaaatccgatactgaaaagactgtgatagggatgtatcggtggtcgttatatccatcttcgagtcggcgcttagcgatcaagccataggaaacagatacctcacccgagttaaggcgatcaataaggtgaggctgtgaatcaactatgaaggcgttgatatggggctgagacgctttcttcgcgtttgtccagcctgcgagcttccattgccattggggtgcatatacagagcccagattgttgctatatagtaaggatagttagataaaggtattatatagtataggaactcagcgacttactcttcatcaaggatataagccggcatattctcaccaaagaagttatccagagaatagtggaaggccttgaccacctggcacgcgttaagccaccgccggtattgatataactccgggatatccttgatattcaggccgtggatatcgaattcatcccaacgttgttaacgtatcacataataggcgaatggattcacaaagcgagggccatagtctaggggatcaccggaagataattctagttcagtggtagtgatatgcagattttccttgttgctgcgagagagaaggagagcgagggccttccgagtggcgttatggcaggttttaacgtaaacctgaccttcgtcccactgcgtcgtttggggctcatgctctgatgtgatgggcttcatactgtgtccgcctgtcggtcacgatagcgagtcaggcgttgaagtctgctaggttgtgctgtcggaaacaagagagtgagacagcttttatagctgatgtgataaggctagaacctgttgttggtcttcttacgtgccttgttgttgttgtgttggttgattggcgtcggttggcttgccaagctggattgaagaaaagcaactaagcccaattgagatttgacacggcagagccgccaaacggtgcttctaactagtagagttccttcgtcgctactataacctccttgagagttttaagataaccgtttttgcgaagtactattcgaaagtataggtataggtataggtatagctacgatccgggaatatttctagtaacaggtaataattactactacttaggaagagtagggcgtttcgctacaaaaaggctacacggtgaaaacgagatttctagatgtaccctttcacactgagtggaaacatctattcatatagcaataagaatgcaataatcatagtcgctgctgaacaaaagaaaaagcgaaagtaaaaataaagaaaagaaaaaagcaaatttgactcctccgtggcttgtcctccgggctgcagcatagcaataacttagaggttcttcatggcaagaattgcgtcacagacatcagctccaagcacagttccagcgtcagcgtcacgagtggaggtatcgccggagtcaaacgtcttgtcttgaacaagggattcggggagttccgatccggaaacacaacgggctagtgtaaccagcgtcgaccgattgaggtactcgccagccgagggccaaaaacgcgtggcttcaaccttccttgccacggcgtcactaactcctcggctctttgcatttaggtatgcaatgatgaagcagaagtacaaataccgttcgcgaggacggttatcggaaacgaacgtcaatggcttgttgtcaatgtcctattatatcattgatataatactcaactctagcttttgcaatactaacctttagtctcatataagatccatcaaagaaaccgatggtgtcctccttctttgattcgtccaagacaacacacctccattgagttggacttttcatcgggccgggcataggtacaatcgcgatggtacctcggtcgaaaagtagctcaatattttctgccagtgtgatgcctaatttgtatgagtcagtcatttcctttgccacaaagagaatattcttacgattgcggcggtcaccaagaactccattgctgactccgaataggtggcaaacatccttggatgtcatagatttgggtacaagatgagcagctttgatattattttggggaagtacagtgcccaacacatgacaccacccaaagccagggcgacaatgctcattgataccgtagtacgcgtagaccttcttcttgaacgcagattgatcatacttggaacctttctgttttgcacgtgcccccagcacacgggagattctagcgtcgcggtaagcatgctcgagcaggctttggtcaaccggtccttcaatcctctgacgtttcgctgaaacttgttcagcaatgtcttcgatgatcaatgggcgctgtgccttcaggacatgaatggttgataatgacgaacggaaggactctaagaaggtttgtatttcttgctgaaaggtgtcgtgggagatcttttctgtctttcttgcttcgttgaggccgtctcggacacatcgtatatactcaagttcactttccattgccgcgaatttcatgccaagaatatcggatattgtcaattcatctgacatctcagaaaggcgggatgctacacttacagacctttgcttgtaagtccgtagcgctaattgacgagagggcgccataagagacgatattctttcggggatcatgggggactcggcaggctttttcactgacggtattatgcggacaagaaaatgaagggctgatcaaactggaaagaagaggtaacaggctagtgaggtgttgggagaaatgcaatatcagtggataagctgaagaaaggtgacagactgatgaaagtgccaagctgaagtaaaagagcaactaagcctaattcgggtttgacatggcggagccgtagtcattaaagccgttactagagtagttgctcaaagcggtctctcgagcggttttcaagcggttgcttaagtagttgcttaggtagttgaagtagttgctaaagtaattgacataaagtggttgattaaacagttaataatgatcatgatatgataaaggggacttgattttattagcagtttgcataccaggaaatatgcctaattgtgaaggctgtactgaattacaaggataggggagaataagctagctagagggcagtcgcttcgctctgcaacgaggctgtcgagatccctagtatcttacagtcaaaattacaaaacacgtaaaatacagcccataccgttatcagcttcgataacagcttatacgatctccacgcaagcttcaacatccttccaaggttctatcgtctgcccagtacgaattgcctcccctcagtaatctcgctatggcgaaggaagtaattactaggacagcacgttcccagcctgataaaagccaagaccatcacaatgacagagagaatgacaacaaacaacatgaatcattccatccgcgccatatcaccctagagacattccacaacctgctatcccactacccatcaacggtagagcgagtacacctcaacaagctgaggctgaagctgcagtcaaaggcagggaagggaccaaaacgaaaagcggggacgaaggttagcatagcgccgaccacaaagacggagctcgatccgtccgaggagaagcgtattatcgaagagagggagaagttcctccagcttgaccggtggcgctatgaagttctgccgaagattatcgcggagcgggcgagtgagggtggtcagaaagaaagcgcgccggagggagcgcacttgctcaaggaggagttaattgatatcatggaatggaagacgtgagtaacaatttgcggtattcatactacaggttctggctttgtctgacttatttctaggaaacatggtgtttcccgtcccatgctcatgggaatggtgaaaagcaaccaagtcgcaacgatcaccaagtctacatctacggcttttgccgccctcccagatgcagaccctgtaattgcgccgaatgatgcattccccaaagccagtttggacgctcttactgcgcctatccgtggcgtcggcccagctactgcatctttgattttgtctattgccacggtcttcggcgatgctaagaaacaagtgcccttttacagcgacgatgtgtatctttggctttgtctgacggatttcccagaaggtatacattgcaaagagcagaagccttctaaacacaagaagcccaatggggagttgattgtcaagtacaatatgaatgagtatcgagatctgtggaatgcctcacaggagctgcgagcacggcttaacaatggcgctggagaaagatctgtctcctttatcgatattgagagggctgcttatgtgctccgcaatatcgctgtctcggattactatgccaaccaagaacccgaggctggtctaaatattgtgaaagatattgattcggtgaataaccagctaccaaaggaatcaaagatagattctggcgagcttggcacgaggcgtagtaagaggataaagcaagaagctacgtgatgacagctgtatactattgaggattgtgcctttcatgctgttgccacttcttcccatactcctagctggagacaagatgaatatcaggagggatctcaagcaagaggaaatccaacacgcattatcccagatatgatgtctctgataaaatagccaaacggatacgatcgtctcacgccttctgtacactaagtcttttacggggtacaagcaccttcccttttcccaaccgccagtatctcttcattaaagcaacggcgggaggaacctataagaatgacaaatgaataaagagacatctgcactggacactcggaggatgttatatagtcgacatgacgcactgctgatcgacatacctatctctacctcggtcatcatgattcgtcattcatattccatagattggtatgatgaagcccaaattataatcctcgtgactctatattgatttacgaccagtagttcatcaatatcttcgatttaatctgcctaacttgctatactatagacaacctacgcgagactaccatgaactacctattccagacgtatatcgtatgcaaactatggctgctacacttcctaggcaacgacatagcaaaggaagcccggcaaagattctaatataatcttcatgatcaatatcaccttcatgacacaccacctgaagccgattcggaagtagaagagcccggcaataactagggtctacataactgaatacaggaatttagttgaccattttgtatagttattacacaggacctgactcaagaccgcttgctggttacagtattcactacggagtatagtctaagttcagaaccgcatctatgccaaaccagtcgcattttttctcagtctcattgctatgtacacagtcacggccgtcacgtcttgattaaaagcagatatgggatacaggagagacgcatgcatcacaagaaataaaagtggggtaggggtaagacagaagaaattcatcagatcatgcaatccatgcattacgggtcatcgtcaagatgaccggtttttccggtgaattgtgtttcgacatgacgcagaggggtagggagaaataagtaatggtggatggtggatagatagtcaggggacatgaagatacgtaatgtctcccgtagggagaagcgaagaagagaggagatgagagaggtcggaatggtaacggcactgtgtgaaaagtggcagtacagactggatcagggcgcgtgagatcatagcagggcattctaccccggtttttttcatgttttttcatagaacaaatagtgaaccccgtcattaccgcttggacggattaggcttgcgctcggcagcacgcttggtcttggcattgtccgcggaagaattgagatagcccacatgctgatcgtcgttatcgctgaacggcacaatagatgagatcttcttagagcgactgcgcttcaagggctgggacaaaggtggcccggtttgcggcgcaggactcgcgagcgaaggtcccggcttggcttcggcggcagccgatggggcagcggcgcgctcgtcgtcctcgacatggatgtggcggaactcctggtcctcctcatctgcttcggatgacgcaggactgtcggagtcggaagctgcctcgtaatcatcctcatcatcactgaccaagctgggggcctggttagcttcgatggcgttggggctcagagtttggtgatccatgtccgattcccgagactgcagagattgggatttgccagcgagcgagatgtccaggaaggactgtgggcgcgagggggtcgcatgctcgatgggcggggtgtgcgcgcggtcgagtgcctttcggctctctgactctccagcagtttgaccaacaggaatacgcatcagctggcgaccggtgcgagcaccaagggagggacggctggttcccgccgacactcctcgatagtcatccgtttccgagtcatcgtcgaaaagaccaccgagatctacaggctttcgggattcttccaccaacttgtccatgtttagaccagcaccacgtgatttcatgagagcggacagatgaggagttgcaggagaagccaaaaactgtgggtttggaggctgttggatgggctcggagcgtcggcgattggtcggttcagcagttgcgggaggagtggtaacagcagacgtggtagccgtagccggtttgcggggggtgacaaagtccttagcgggtgtacgaagagatttccagggggttgtagcaacgtgggtagagcggatgagaggatgcacgtagcccggaattgttggattggcagtgggctcagcagagccaccgacaacaatcccggcgtcgtccacctgaacagattgaccgcaagccatggcagcagcgtcgtggctggcaaagttgcggttgtgcgcgatgcggcagtgattaatgaatccctgagtgctggagaagttatcgcgccggcagtccagacagaccagcttgaccaggacaccatccgacttgcgccggatgagcatgggtcccgacttctccttgaccacagggtaaccagccgacagtgcggtatgcttggtggcagttgagcctcgctggggacgggtctttccggccagcatgcccatctcaccgggattcccgcgcgtcgaccgaccctcaaccagcgaattggctcgcatcccagagccgacttcaccaccgtcaaagcgagggtcgggaagcaaccaccgggcgtagtggcgggcgtagggaccttccgttactccccatggagcaggcgacatcggcgcgggaccatttccaggtgccagcactgacgcgcccgttcccgagctcacatctggcgagacaccggcaacatgggatccgggatacgggatttcgccacagcgtcgcagctgttccagagcgacttggcacttggcgatctcctggtcaataagacgaagctcgttgtgcttgagtaacacctccaagctcagctgggcggtgatggtttcccgaagtcgggtcacactaggtctggcgacgacggcgtcctgcgccggcggacgcgcggatgcgaccggtgagtctgacgatggggttggagtagaaggggtcggggtgatcgagtcagcgatcacggtcggagttgggcgcgtagaaatggagtcggcgtagactttcgtcctagcgggcgcatcgggcgcatcggtcgcgtcggactcggagtctgaacgtttgcgtttgagctggggcagcgacagagcgttgataccacagtttggcagcattttgacatcatccatcaccttattccctcctatagtagagggccagggaagcaagcgaaacatgccatgtgactgcatagagatggttttggattaggtggcagatggtccatgcgttccaagtttattacgggaaaggaatggacgtcgattgcgcgaccggatgttgattacggaaggcagaaaaaaaaatctattaataagagggaggagagtacaataaagagaagggggggggagaatgagaatgggagaaagaatagtggacagaggaacaattggaaaggaaagggaaaggggaagaaagggggattgcgagagagacagaataagagagaataatgggaatgggaatgggggagaggtgcctgagaggagaacggggtggagtggatgatgcgatacttgttgttcccatacaaattgtatggtcgggccatgtaccattggataatcccattggatcagtctcaaatatctgcgacacgtcatacactatttacctgaattatttatttatttacggagtacaatacggggtatacggagtatctattctattatgaatgattcaaggcattcatgtcgtcctattcacctactacctattcacagttactgtattcatccataacccataaccttttcacattcggactatgctggtacccaatataaagcactctgaccgatcctcttgcatgccaagcctataacgggtctgggccttgccctattcctgcctaagctagctgtatctacgatctggaagatccctagcaaatcagatcctacatctataaatttggccgggggcgaaccggctataaacaggttctgactgcgcctcaattgcatgtgcgaaacacaaaagtacaactcatattgcataggtcagatgtggctgagaaagcaaatggaaagtggtggaagattgtcgaaccgaagggaacaagggagaataggggcaattctagggaactctatatacaaccatcggagccattattctacgagatatattgcccctatttatagcgtcatttgctgacatccggggtatactctagccattttaaggcatatcaagatcggactcttatcaagatattccacgatcatagtacataaccctaactcgtatccgtatctcttcctgacttttaatctgcatccactcatacctttcgctcatttactgtacggagtatactttccgtcaccatcctgactatcgtagaaatgtacttggtcaaccttgcataatatatatatcgtattggttcctagcacagacaacagtacgatccctctctctaacatttccgagataactcgctgcagagtataatatatacttcatatactaagcacattcgaatctccaatatttcattcatgcactccgcattatgtggatgcgatcaacttcagaccccgaattctaatcctagcctgcagatcacttggacttatgtaccggtttgaaactcggctgttcgtgttgtaatctatcgacgttaatttacggaccacctagatactattcaagatatgtatacagataaggcatgtgaaaatcatatttaacgttgcaatcaaaatagtagcccctgcttttgcggaccatacagcgaatctgttatcgtcaattgtctactcctcgagtcactccaacacactcccagcattaacaccccttagcgccttgcacaaacaaccaacaacagccttatcgatccctaactacggtataaacctagttggctagctcgaatgctggttaggtttattctcgagcggggactttcacgggattagtattactttcagtgtgcaaatgctgggcgaatttgtgctgatgcgagggatggaaggggatgggaggttcctatgtttgttgatgagtggtctcgagaggctggtaataactatcaatgttcttgcgctccgtggtattacattctgggcacaaagttctccagtgataacaggtttactgccaaaggttaatctgaatcattgtgaaactttgctgagcgtatctagggatagacaatttctcgtgagattgacagtgtgtacatatagaatgccacgatatattcaattctagttcaatcgttcattctttttcgcttgttagacaagcacaatccccaaacgccagtgcaataaaagaagatagacgctcgactcgagcatatggacgcgaaaggcattctggcctcataagcgtaaagcaggccaacacacgccaagtgaatacataaaacagatatggttgtcgaaataaacagtgaacgaacaataatgggccaacgtgatcaatggtatagcattcagatggcgagacggagaaatcaaatctccaatccaacatcgccatccccacaagaaaagcaatagtatccactatccaggctgggcctagttcatctccccatccttaatccgcaagatgaagttaacaacgatagcggcgagcagggcaatggcgaggattgtgggaccgaatcgatcatcgataccgctctgcccgcgccgacggatactctgcgcacgccagtggaatgtcacgagggcgtagatcattgcgcccatggcgatgacggtgaagagagctgcggagatgcgaccgatgcgatcgccgaagttgagcagaccgacggctaggccgcccaggatgacggtgaagttcagccatgagaggaaggtacgctcgtttgcgaaaaagactttgggctcaactcgggttgggagggcgatccgcttgcctggtgggtgttagctgggttcgggtggagattggagggttgaaaggtggttgtggtgtgggttaggatggtgcaattgttctgcttctcttgagtgtggaggttatcgtggtgtgagtcggcctccacagcccaagagaagcaaaacaattgtgcgccaggaagaatggcggtgacgggagtgtgtctaggtggaattgtctctcatgcggagctgctgagctgctgagattggaggtgttgtcggacttacccggagcggtttggaggagaggttggctagacattgtcggatgtgaagaggggaggttgttgggagaggtcggaagaagagaattattggaagaaaaatccaaactcagtcaggtacagagactggcgaaggaaaaagcaagttaaaagaagcgagaggcttcaaaagtcaagatctcgccccccccaatgttctgttccgtcctgggactagcgcatacagctctgttgcacgtgttcccacgatttgatgagaggatcaggtgactaagtatacgaaatagcgtgggtttttagttttgatcttggatattattacagaatacctgtatcattcatatatcaattggtcagatctctattaacagaaagtgcctgaattcgacacaatatatgctcttcattgatatttacaacgttggattccggaggcccgagtttcaaccctctttgccttactctcatacggcgaaggtgaatggtcaatgcaaaaataggcacggcatcaagctttagacttcatcttgatattatccgaatatcccccgaattagtagagctgacaggtaaaatgtacaaaattcagcccaacattgcatgcatctataccatatgcctgtatcgggtatcttgaaataatatccttcccgatatcgccccaattaaaatgggtcgagacctaattcaaggtctagaatatatagatccacttagtctaatatagccgctatgctggcattaattgggtgaatggtagtctaaattcgaagagatggagtgatcaaaagagattatcctcccgcatagctgttacaaagctgtgaggttatgagaagagttcaaagataatgcaatttccatgtttgggactaagtaatttagtgtgctatagttagggtttggagggataccatcaagtgaaacgaaccctacgtcatagtctccttcctagcccaatcctcgagaatcaaatccgccgccttctccgcaacagcatacacagtgctaacaatattccccgaaacattattcgcgaacacggacgcatccgcaacacgaagtccctccacgcccttcaccctcaatctgctgtccaacgcatcacccatagcaacggacccgttgatgtggtactcgcctaaaacgaggtcatacactgcttctcgggccgtatccatgtcctgcaagttcatactaaggtccggataagcgcgccgcaggaacgaggactccacgtgctttgattttgtgactttatcagcccagcgcagtaaggccgccaggagggagacgtctgctgggtggccgccgtatttggggtcgatgatagggggtttggttgggtctggaagcattagtatatgagatgattgggtactcaggggagtcgtgttctgtcactcacctgcactcccaatatggatagtccctctagatatggggtactgcagagaaaacgccatggtcaaaccagctggttgatcagccgaacgcggtgtaagcagcttgctctggtgatccatcgcatgcgggttcatggaggctggcacggtaagagccttcatattggcagagtggtcgctctcgaggtgtgcaatagtctgtgcaagttgtttcgcgtggaatgcgctggtcggtttgatatcgcgaatactctggatgatctctcccagctccgtctctgagagtattctctttgccgggaaaaagccctgcatggtgctgacagagctaagtggcccgccattggcttcgacatactgcttactagcagcttccattgcctcgggcacttgatacaaggtatcccgtgtgactattccgggctggacatccattacagaaaacgtgagggggtggtctaggacgtttgcaccgacccctttgttagcgaccttgcactcaacgccggcggctttgagaatctctgggtcaccgatccccgatagctcaaggatctgggggctttgcaatgtcccaccgctgacgattacttcacgtcgcgtggagacctggtactcgactccatcgtgtgtgaagcttacgccggtagctttgttgccgtctagtacgacgcgattgacgagggccgagcagacgattttgaggtttggccgagcggtgcggatggcttcatagtatcctcgtgcggagtaactgcgcttgcctttattcgggccggttcgatcgactgcaccgagggtgtggtagaagccgatgtggtcaccactccatgcgtcagtgggcttgcttgatatgccggttacatcctcgcaggctttaatgatgtcgttctccaccggcaggattgaatcattgaagctggtgtgaatgggcccgctcgtgccgtggaactcgcctacaagtggcattgtggaccgatcggtgattgatgggtcgattggctcgagggtctgttcattttgttggtctttccattggaaagaattagattggaaagtctaaatgctgagatcgtacctgatgttttcgcatatactgctgcatatgcttcgcggaccatccatcatcccctaccagctccgcccagtcgtcgtagtcttgtgtcgatcctcgcacgtagatcatataattcatgccgctggatccaccgaggagctttccccgcggcatatgttgagacacgccacgattgccttcctataccccccaggaaatgaattagcgacctgaagcagaagtatgcaatgggagtacctacctgcggcaccgtatacatgcaccaatcatactcgggattctcgaacatctgcgggaaggccgcaggagtatcaactattggatctccaatgcgatacttgcccgcctcaatgacaccgacggttacatccgggttttcgctgaggcgcgctgcgagagcgagtcctgcagttccgccgccgcagatcacatagtcgaacgtggtgctggtgaactcctcgactgtgcaaattggattctcggccattgtatgattgttgatttagactggaagagtgtaattggggagacccacaagttaagtaagcacagaagggatagtaacctcaggtaggacgagctgcgggggttagtaaatacttaccgatagttatgccaatagagtttaaaacataccgaaagcggaaatatatggcatccatctacttcacgaaggttgtcccttggtcaagatcaccgccgctgacgttcatgttcgttggcggcaattctcagtctcaaaaagatagaaatcgtgtttttatatgaatgtaaatcgcttcaaaaaatgctatatgtacaatgtgttagtctcaagtgacccgactgacccggccatgatgtttggatgacgcagtcaccactccaatactcaaagctccatcttccgctgcacccaagcaagagctctctcccacctcgcatccacacaccttagagcatcaaacaactccgaaaccagcgctctacctgaatcccgcgcccaccatcgctgcccatcaagctccctcagcaacaccccccaatacataagaatcagcaacgaaaatggctgccgacaccggagactatcaacaaattctttctcaacagccgcaagccaagcgagaaccggcgccggatccgccgagcgcgcaaacttggcataacaatgcctcaaatgcgcaataactttcttattaataagatgctgccccgagtaaattccaatcataacttgatcattcaattccgatagatgtgtcagcgcagcttctgcatcggtgtcaagttcagcaggcgtgtttttccaaaattcgccctgcgagaataactctagcttaatccacgacttggtgacttgaatgatcttcttcacgccctgcagcagctcgaacagtatcacaatgttttctgtgatactggcgcactcgtctttcgtgacggttagtcggggtgacgcaatgctgatcgcgatcatgacgatcgagtgcgcgaataccgcgtcgcagttctgcggcgtgatattatcgatcgcgttgcggaatggagtcaaactacggttgtagtactgcagtcctgtctcgtagtacaggagtgctaattctggtggttcgcatgttgttgcgatgtgcattgaggctagcgccaagatcccgctcatcagatatccatgtttgaacgcgagtgttgggatggttatttgccagatttttatttccgagtcgctgatacagaggctttcgtacgtctctgttgcgaacttgtgcattagttctaggttgtcgattccgaatgagtttgtctgggctggtgccgggactggtattgctgtgggaacggctcgaccaggcaccgctgtgggcgagccgtggccatctagaggccgaggtacgtcggatgttgaactgggtggggtaagatgggctgtagcgcgacgggcagcggcgactttcaaatatgtgcattttaactcgcgggttgtgcaattcgagcatggtggaccctgctcgtcacatttgacccgcctgtttctgcattgatcgcacccgttgcgggattttgtgtgcgcgcgtagagggggcatgttcaaatttaattgacatggtgcggagaccaatcatgaagatgcctgtgaataaatgcgaggaggaaattatccgaggtagacatgttcccccgtatcatgtgactcgggttctacaccagttttggaagtttgtggcgggttggatatcgcctttcatatgatgtgtacggtattctcggtcacaatggccaaaatcggcagagcattatattatgggcatagtgtatatccttattggaataatcttggaatacatctgaaggctcagatgtcattgcacaagatactattattattagaactgaacataaaatcaacatcaacatccccgtccaaatgagttaggaagaatttcaagtgcaccgtactcaaataagacccacaacagcaaagataccaacaacaacaccagcaatgctaccggacattttctgggcagcaccagtgaaaataggagaagcagaagcagaagcagaagcggtagcggaagagctaccccaggagccactcatagacttcgaaggagtaggcatagtcttgccacccatacccatagcagccataccacttggggtacccattgcagtcttctttccaacctatcaatacaagcaacatcagccctgcaaacaagggacgaggaatgaccgaacaaaaaaagtcaaacgcagaaggtaatctaatttacctcgacgatagcaggaccagcaagaatattgtcatcagtggcctgcttgttgccctgagtgaggacgacatagctctgtccggcaacacccttgggaacagtgacggtgaactttccattacccatggacttgagaggagcccagactggaccggtgacggtgatgaaggcggcattcacgtcactagcactcgcgttgaagccgctgccagccatcaggtgcacttgcgagcctgtcatgacggcgttcatcgagctcatcatgagcgaggggaaggccttcacgggaagcgctccgttgctggagggacacgagacaatgaagggggaggcgacggtgtacacctcattgaagtcgagggggttgtcgaaggcctgggcgaaggggacttcaccgagcgcggcgcgcaggtatgcgctgtgtcgggcctcggtggtgaggatgctgccagcggctgtcaagtaggtgtcgctcatgatggaggctgcggctccgaggtaggcgctgactccgacgcctggggaggttattagtggtgattcttagtgtgattggatatattcttaccctcaagaacactggcaagggctaggaagctgttgacgtcggtggatgggaagttgtaggtgcagcgggcaacaggagaggcgccggcagctagaaaatgttagtatactggtctttctttcgcggtctaaatgacaggaacatacccttgagtgcggaggtcaagaaatcaacgtgctgcttctcatcggaagcaacctccttcaggttggcatagaaagggtccttcatgccggccttgatgaagtccttctgggtgtagttcttgagaccctcctcgtagaaagtggcctcgagatgctcaagggtaagcgcatagttgagcacgtcggctaaagaagaagcacattagacaagtcatgcattggttgggaagtgacataccgtcgctaatagcacgcgtcgagacagggccggcgttggcaagacccatagcggcaccggtgagggcaagattggtgaacttcattctgtagaatagtagagcttcggttatatcttggattgggagtctggatctaaatgaaggatgataaatctatttccaagtagagggacatgtcttttatagctgccctgccggtaatttgggggtccgatgaatggacgcctgctttgagctcgggcattagaattgcctggctgagcagaaactagtcattcttttccttgttttgtggctcatattgctgacatcccaggcgcaagactgagatcggcggtaggggtttcagatcgagacagaaagggttaacggaagactcggatgggatgtcaacaataactccgacagtaactagaggaagacccatgctccacgcgatatcatctgcaggaaccactgtggatcaagccggggcagcttgtagggaagttttcccaggtcgatcatgctcaaagcggaatataatgccatagctttgcatggtggagaactttactgagttctggggctttcagctgcaggaaccctggcggggtcagaagcgagagcgagagcgaaattgaatacgcaacgagagagcacattaatagtagcaccgagagcgaaagcgggaacgagaccgagattgaagcgggagcgagaccgaaactatgtgtactgctctaacaggttttattcctaacttttgagatatccctttttcttttggagttgaacgggaataggtgacttcccatacgacctttgtcaccggcgacataatactttattaatctgatatattcagcgtgagattatagtagggattttacatgtaagaatacctcctctaagtgagtaggtagcgtatatagtacatccacctataacgcttaatagatactatgtacctactacaagctattatgaggacctagttaagcctactgtcttaattatgggactttgccgttgcggcatatgcttagacttcaattcactcgttcgttcgcccagtattcttatcaaccgttattcaccttttcagacgtctgacttggtgatctgccattaacggccttctccccatctgcaggggggagtggcgtctggtctatcgacgcaaaattggaccgcgctcggatattcgccccgtatttatagaaaacaaaaggtatgagcatcaacagcaccgccaatgctccgatgagcgatccagccccacccacaccgagcgcgtcgaacatgtactgcgtgaatagtggggatgccgcggcacagacggaccgcaggacggtatttgctgcgacggcggatgcggcatacatcaggtacgagtcgatgatatagttaatggagacgacaaagatgaggaggattgacgttgcgaggaaagttcctgccacagttggcacggcccagtgaactgagttgtattccgccgtccaagcgaaccaaaatatcgtcactgcgaacataaccccgccaaccatggcgccgggaaggcgatcttctggaactgatttgtagcttttggtgagcttcctttggtatatttggctgttgataaacatcgccaggccgccgagacacgctccgatgactgtgccgatcaatggcagctcgccgacgccggtgttccaaccgcgcttttgctggaagacaatagggtagatgctaaacagcatatacaacagattatagacaacggcaaagtaaatggcgacggagaagctgatcgggtcaatgagaagtctccaaggcctcgtcaaggctactgtgaaaatgcctcccagggaacgatctaatgtctcgactggagccttgacgttctccttgccgggtatcttccggaggcgacgagccttgttgcgcagagccatcattggaagggtctccagtagagtgatgagcaggagctcggtggcacctgccatttagagtaggacatagaaggtccaacgccatgtctccttcagttgaatgaatccactgactactggctcaagagcaggtcctacaaatgtcatcgtcgcaaataggatcatggcgttgccacgcacgacgggtccccatatgtccgcgaggatcccgggtgcattcgttagggcggcactgacggctgtgccagtcaggaaacggccgaccaagagcccggcaaaattaggcgtagaagcccagagaaacccaaaggcaaaggcaaagtaaatggtgaatgagatgtagaagatccagcgacggccgtagaactcggataaaggcgcccaaaatagcggaccggcgcagtagccaaggaggaagagggttgtaacgagtccagcagcctcggtagagacatggaggtcattgctaataccccgaaaagctccggatggtgcagaggaggagaaagtggcattcataacgagggagatagcgacggtggtgatatagcacttccgtacgaacgggtagttttttgggttttcagggtcatttggtgaaaaatcgaggtggccatccttgtcaaagaatagttcctcgtccgaccctaccatgggtcctgaggtagacattaggaagttgtgcctgataaaattcattgctcgtactggtgaaagagcgtgacagtccgtcttgacataaactataaagcagcccgctagaatcatttctaatcgaaagctttaattggatttccaatctatactataagccttccgggaaaacataatcactgtatctggtaattctgccttttcttccggtgctgatatggggcggatgcacgaatccggtaatttcttggcttagttccgggacactatatacagggctagacaaatcaacctcccattaccaatcttaattccgatgacaaattgacataatgtttatagaattcgtttatttcaccctctcatgccgtaagtacaaagttagctcatgtcatgacctctgtcgtctttcactcaactcttcaagctttaccaaagcatccatcaacatcatccagcctcgcaactatagcaatggcaactccaatcgtcacaatgagcttcagtgaagcagcccagaaaagccgcactatccgagctcttgaatcaaagacgacggtccccgacagcactattgtcgggctggccgaggccgccatgttgaccgtcccatcggcctttgataaccagtcggcccggctgacagttttgtttggagacgaccacagaaagctctggtccatcaccgccgatgcgctgctggcgaggattggcgagaagcgctggaatgagggcaccagggaccgcatcgtcaactttgccaacgcctacgggaccatcctgttctgggacgaccagtcgtgcgcggccgcgatgaaggagcacgctccggacatatacaaggacaagacagacgagtgggtgcagcagagcaatggtatacaccagtattacctgtggaccgcctttgatgccctcggactgggtgtcaacctgcagcactacaaccccatcatcgactccgaggcgcagaaggcgtggagcgtcccatcagactggaagctaaaggcacagatggtgtttggcgtccccaaagacggtagcacgctgggggagaaactacagaagcttcccttggagtagaggctgcaggtgtttggagcgaatgcgtgattgacacagaagtggaataatcggtcgcttatattctatacatactcaatgatatagcttgcaatctgaatatcgaattgatttataatgatattacagacgatatgattacgattctaccacaattctactacgatatttttttgatatatttttttgatgccttgttaggataatcagtcgcaacccgtagaatgagccgaaaggtacaattcccgcataacgagggcttgatatataatatctagatcgctagaagtgcttgtttagttacctctactaagttggaaaatccgtagatggccaaatctttgctgggaataaaaacccgactgttgccactcggtcatgtgaccgggccttccttagtgtagctcgcagactagcttaatcaatcatctcttaccatccacactagttgtaccaacttggtagcatgtcttgagatccacctcagcgggatcccctgagctagaaattttcttttctagtaaaatagtcatcggagaccctctgcaaagaggccagtcccccagattccccgacaaagccagccatcactggcaaaatcatcagtttcatcagagcggatggacaaacagctccacagagccatcctcctcgctgtacagctcgataactacatccagctcgaccaaccttgtgctgacgaatttgactctgacacgaagtcaaggatcagcttcctactgagtccccactttaaccgtcccacactacctaaagcagaagatccgtacccacctgactggtcgattcaccgaccaagcctccataaggcgactgtcgaatttattaggcttnnnnnnnnnnnnnnnnnnnnnnnnnnnnnnnnnnnnnnnnnnnnnnnnnnnnnnnnnnnnnnnnnnnnnnnnnnnnnnnnnnnnnnnnnnnnnnnnnnnnnaccatcccacactacccaaagcagaagatccgtacccacctgactggtcgattcaccgaccaagcctccataaggcgactgtcgaattcattaggctttcccctttcatctctccaccgatacagccaagccaagctgagccacccaggccactaggaaggaaagccacacgtatacgcagacagaaaagccgtacaccgactcccgaaggacctactacccagactctggaagaaaccacccagccatctgtagaaccaacagatctggaactggaggagttttctcggagtccgactggcgtccagcctgtcccacatgttacaagggagataaccggcactggcacaatcatccagcccgacccgcctattgctgttccgcaagacagcagtagcttgtcgtcaacaagtcaaagctacatcaaccctataaccccactgtcggacacgatacagcctcacgcaagacaacccaggagattcatccagagaacctgttcggtccaacgaccagcattgcaacgaacacaacccgaacaacaacgaacacaacccgaacaacaacgaacacaacccgaacaagtcgtaatcggaaataacaatatggctggaggcgaaggaaactcagcggcccccggaggcttcacgctggaacagagggaggttatggttcagatgatccaacaagcagttactcaatcacttccccaagcaatatccggcgccctatccaccattcctcttaggcaacctggaccccctggaccaccaggaccaccagggcctgacggtcagctagcgcaccccgacacaacgtggaaaatcgcggaaattggttgtttcgatccagacaacaaagccacaacagcaattcggtcagtgaaccacatcaaccattataccaacgtctactcttgggtggaccacatgcgagacatcgccaagctgaaatccgaagacgttgtccgctcgcatatgagctactccctgaagaacaaagccaccaactggtatgacgcagaattgaccagcctggagaaggaagccctacgtgtacttccccttgaggacggatggtacaaagagttgatcaaacggtggaagccacctctcgccgaagctttacggaaaatggatttcaccacgtacagctggacagatgtccgagctggaaaagagccaagggaatacgctcaagagatcgtgcggcacgcccgagctgcaggccgtactgatctttatgaacaactattgaagatacgagaaaacatcgagccgtcccttcgagctgttgtcatgaacccaaccacgtcaaccacgctggctgaattcctagaacacctagacgtcaaattcttggattggcaggaccaagtccagttgagagatcgacgcctacaaacccgtaggtcgcagcccccaccgaggaatccaaggacccagaacccaaggatccaagaaggcccccaggctccaggccgcccccaaaatacccagttctggacttcacaccgcttccaagctaacaacccgcagtctggtcttaatacatacaatcagcagcgcccacagaaccgtcagagttggcaagcccaaccaaggtggcagaaccagcaacgcgggaactggcagcaaacccaagctcgcgaccaaggaaacctagccagaccggaacagcgccagttgcccgctctacagcagggtcaacccggaactgaacaaagacaacttagaatctcagaccggccgtattatcaaaacgaggaagcaaatgcgaaccaagtccgaagacaaacctggaaccaacgaaggccaaccgcatacgtaactgacctcgaggaccaagctgaccaagaactcgatcaaggtgaatactgccaaggcgacggctacgatgactcggatgactttgaggcgtactacggggaaccgtacctcgacgagccatatcaagaaccgccacaccaggaacagcctgggaatgaagactcaggaccagctacggcacagctttgtcatcctcaattctctgtgacttgcttgaattgtgatgtcagttttgaatcgggaaataccctccacaaacaccttgacagctgcaagcccccggcagcagggaccactgaagaagtagcaccggctttcttcgcaaacggcaccttgccattgtacgaatccgaccgtgccaaaactcacgatcctggatacgcatttcgtacttggaggtacgcaacagctacaatagcgttgggttcccgcaatcagtgcatcacagcttgtctggactccggatgcgtcatgaccctcattgattccgatatagcgaagaaactagatatcccaatttctaagttgtctaagccaatctcagtcagtggcatcggatcacagcacacatcggaggagtggataaagcttgacatttacttcatgggaccagttgcgacagccaaactgacgatcgaggctcaccttgtacaagaccttaaagccagactcctcatcggcatggacgtcctaggacccgaagggatctctatgaacttcgatcaaaggacagcacgaattgcctcctgcaaagacatggaattcggtatcagtatccagtcaaagccaaataaaatagagctaaaaccagtctatttagtagataagattacaatccctccctatactatagttaacgttccaattagaataagatctaagctaccggaggggcgtgacttcatcttccaaccggacgagaaacaagggacaatgtacacccatatggtgaattccaacttcgtattcgtcccagtcaccaaccaaacatctgtcgcacgaaccatcccacgccgagttcggataggcacaattatggagaacgacgatcccacaggatatatggtgcacccagctgaagcagctttagcggccacaccagataaccaagcacaaccgaagagtaacctgaggcccaaaaacagcaaagaaaccacgctacctaatgggatcacggtatacggcgacgaagccacagcgaacgcactcaaggaagtgctcctcaagtacaatgtttggtcaaaccccgaggtcgtggacattccccccgacagatggatgaggatcccgatgctagagggctgggagaaaagggtaaagagaaagagagtctacccgactggagaagcagagaaggaattaatcgacaaagtattcaacaagctccaagccgaaggtaagctcaaatgggctaccgatcatactccgactggatacccggtatttgtcacatatcgggatgtgatcagagatggagtccgtacccgcgtcggacgcccagtggtcgacctgcgagacgcaaacaaggaagctgtgaaggacatgtaccccgtgcctactcaagatgacatattgatactttgctatggaaagctgtttattacagtctttgacgctgctgcttggttttaccaatggcgggtccatatggacgatgtgggaaagctcggcgtgatcacccacagaggtcacgaaatattcctggtgactatgatgggccattgcaattcagtggcctacgttcagcgggaattagatcatttgcttcggaagatccggaaattctgcagggcctacattgatgatctcgttatagccttagacagcttggccgaatatatttcctacctctataagctccttagtattctctaggaatataatatctgcctagaactgaagaaatcatttgttagtttcccgagtgttaacctacttagccaaagggtcgactcgctaagaataataatgatagaggagaaactacgcgctatacttagcctagactttccctatatactgaaggagctggagacctacctgggcctagcaggatacttccgtaccaaaatatggagacacgcacagatcgtcaaagccatgcaggacaggaagacgaacctactcaaggcaggaccaacgaaaggaccacagaggagagccttctcgataagaacgctgttcgagaaccctacaggtgccgaaagggccagctttgacaatctccaggctgcaatgcgacacgctcttgttcatatgacagtgttttttgaccacacaagacagctttatgcggaaattgacagctcaaaggatgaaggacacagcgcaatgatcttccacgttaagaaagactgggtccatactgatatgaaaaagccacctccagcaaatgtggttgaaccgataatgttcctgagccgacaactgtcctaagctaagcggaattactggctaactaaactggaggtcgcgtgtctagtctgggtgctacagaagaccagacatctgcttctcgcaatcccagccagtctcccagcaatcgtgtataccgatcacagcgctacggtcaatatctcagtgaacacaaatctacggtccgcggcgacagaaaaccagaatctccgactagtaagagcagcctaatttatctaaacgtttaacttaaaggtctatcatagatctagagtaacgaataaggttacagatactctctcgagactctagaataatatgccgacgaagcctaaggaggacacggatctggacaactttacgcaaggaattgacgctttcctagtgactctagtaactggtatagtagtataagaaagccctaaaatatatagaagagtctttatagaactcttagataaaataaaagagacaattcttttaggatactagaccgatacccaatggcatagagtcatccaaaccttgcgaggggaggaagcctcggcggaccctgtgccaaccaagctgccgtacaggttggactgcaacggattactgtacttgacgtataatgacggagctgaagcactctgcctcccaaagtcaatgacgaaagacatcttctcactgattcacgacaaccaagctcaccaaggctacgaccgctgctggcaacgattgaaagggatctgcttctacaagggggcaaagctattgagagaatacatcaagagatgccccatatgccttgagcacagaacaccgaggcacagaccgtacggtttgctccagccaatcctatcgccacccattccatatcatactttgactatggactttatcgtcgcgctgcctgctaccccagaaggatttgacgctttgttagcaatgaccgacaaattctcaaagcagaacggctttgttccaggaaaaacgacctgggaaggagccgactgggccgaagcagtagttaccttttggtggactgcagattggggcttcccggccgaaatcatatccgacagagacccgaaattcattcaaggtctatggaaaggcattttcatgctattgcgtgttgaattgttctataccacagcttaccacccccaagccgatggccaatcagagagaacgaaccaaaccatcgagataacgattcgacactggtgcgcacaacaagctctccaagccggcccggacgacgagaaaccgaccagcaattgggccaaagccctaccattcttacaagctacgcttaactcttccgctaatacctctaccggctacttaccgtataagcttatatatggcatagagctaaagtaaccactagatataatacagtaagccttcgcaattagctaagattttacagctagactagataccgaatacagcttggcctatacagctatagtaataaagaattactacaataagtcccacatttagaaatagtatagcctaggcgattttgtctatctgcgactcggacacggatacgacatcaaggccaaccagggactgccgaggaaactggcccaacgattcgtgggcaaattcaaagtcttacaacgagttggatctctagcgtacaaactcgatctcccgagctcctggaagattcacccagtgattagcgttgagcacctagagccagacccacccggtgaagatctctgggaaagaactcccgagccagcccagttgccagaaataggaccctaagctatataggcagttattagtaaatagactcggaatatcggatacctaagagcagatagtactagagctcagagaaccgaataccttattagatttataggctgtagagctactaataattaatagattttagctttaaagctaggctatactagctagttcgaataatacgactagcgggatagttataactaatcccaactcagaaaaccaatcacttttatatttaattgcattccttacactatcaaccaagcttatgcaacgagcaaacaactcttacagctctcactttaccttcacttgatcctcacccgcttactttccccgagaccatctatactcacccatccttctaaatcttccttttttctcattcctctttgtgcatccctctaagtcttcttccctttcttattcctctttatgcaactccttcatctgaacaacacgcactacaacatgcctgctaaacgcaaggttccatcggccaacgatgattcgccagtcggcaagagaacggcgccgaagccgggttcaagggcctacgctaaacagctattgaaccttatgaccgaaactgacatggcttgcaccgtcgcagatgaagaaaagtacgcccaagtgatggaatggtcgcagagagaaaccaacaagagactcgacgccgaaaccaactacgctgaacgtgcactatggacccctggcgaagaacccccgactgactttggcaaagtcctgaccgcagctgagatggcagaagcaccgctttgtatcgagaaccagatcgaccaaaacggtgaatgggttccgccaccacgcggtgtgaagctgagcgacgaaggtgtatatctggccgccaaaaatatgactgctgtggagcgcggacaaagattcccagtcgacttcgataagaacgggcatgtccgagccacacgcatcccagaagacccagcaccactcggttgggcccatggcttacctatgataatggtggcacgagggataatcccactcgttggacgagagcatgccacaaagctgggcaacctcaccctgaaaaccgacgccaatatcaaaaattccccagctttcacagtcggcccagtggtcgcatcgaaatcctttgtcgaaatgagcagatcgatccagcgccaatatgtcacccataagcccgaccgggagtacaaaatggagtacaacgtggataccgcagttgacatggtctccaacgaccaccaggacatggcaatcctcctaggtgactctcacactggcgctccaagccgtctggtacgcctagttgatttcgacgggtatcagatcgagcgcgcggacaagacaaagaacaataacgcttacgttattccccgcactttctttaagaagtacggtattcccaggtacgataacgcaaaacacagactttacgaaaactgcaaagaccccttaccgaaacctaaaggcagccagtctatatcaagctcgtccacatcctcgcatacactcgttccggaacaacctaaagaagtaaagcctaccgaagagaccgatatcacattgattatcaagctcaacgccatcgaacaacttgactccgaaggggctcaggtagcgaaaaacatccaccagttaggccatcagaaacaggaatacatagcttggtacaccgacgacgcgacgacccagtacgaggaatacaaagactggataaatgggtacaataaagcccataccgctgagaaggaacgtgagatcttagccagggaacttgctgcccaggttcagtctgtcaaaatggatttctctggggaggttttgaaatctctgctcctccactacgtcccaaacctcgacaccctgacgcaggaggaagcacagcaggattgaccttgcactcggatttccttttacaccaattttaatatccatttttacaagagccctcggggcgagggcttcttcggaaggggcgcctgttgccacttggtcatgtgaccgggccttccttagtgtagctcgcagactagcttaatcaatcatctcttaccatccacactagttgtaccaacttggtagcatgtcttgagatccacctcagcgggatcccctgagctagaaattttcttttctagtaaaatagtcatcggagaccctctgcaaagaggccagtcccccagattccccgacaaagccagccatcacccaccgaccccacaatttgctgctgaaagggttcattggccgagatcgacggggttaacatccatggatgcacaaacggaccgaagctgtggcggacgggcgcttatcttaaagctaacacccatggcatacctgcagggccctctaacttaatatctcccaacttcctctatgtttcacagattctctgccgcacctgcaaaggcagacagccaaaatcaaggctcaagatcggctcggccagaaacaagactagcgacacaaactctaggcctagcctcgaacacacagtccgtcccctggctaagagaaaaaaggccgctagagcatgtgaccgctgccgcctacatcgcatcaagtgcgatgagcagaagctgtgtacacagtgcgtcggcattaaggcaaagtgcatcgtgtcctatgccacatcacgcttgtctcgggccaacaatgacggtgcgagatctgaatcgccggccgtactccctccaaggtcgtcatcaccctagcctacttatgctgcacgtcgcaacgatagggccagcacaagcagctccatcgccaacaccagcccaactgtccctccttctggcataaacatggaccaggagaattcattggcgacagaatttccggataacgccacaaaggaatttttcaatcttgctcatatccaaggcttctttcccaaggggcagagctctgaacttggaggttgtctcttcccccagctcccatgtcccagcgttccattgggggaacgccctttcgcttcgaatgtgcttctcaaaagctagcgtagctactatctccggcttttctgggaagtttgccacccgcttctgccgatcatgagcaagattgaattcgccgagcttgagaccctgccgccaccgaccatgtatgatgagtattcggtaactagcgccctggtcgattctatgatcgctctgggagtacagaatagccatgtcactggccttgctgggcgtatattgggtctccagcagtcatcctaccccgcagccctcccaccggaagctgcttggcccggttttgaatatttccaccgctcccgtcagtgtatgagggcaacacagatgagacattggaggccctgaaatgtcaagttctcatggtcctctacctcttgaaggggaacgctttccgtgacgcatacaacctgcttggcatcactgtccgcaaggcctacatttctaaactccattgaccgcaaccaagtaatctccccgagattgaaaggacttctcgcctgcagctgtggtggatgctcttttccctgaatctccagtgctcgctgcagctcgacatgcccccggctagccaaaagagcctcgccaaatgcccttttcctgacgaggacgctctggcccgctatgtttcctcgccacacgaggatggcttgaacgcttacatgtactcgacccatttagttaagttctccatgattgtagctgacattggcgtatgcgcctcaatcgcggacctcgtcgacgacgacggcaatagcccggccgctctcgaaaatcacgcccttaacctctcatctgctccccgaaatcttgaggtctggcgcgaccagctaccttcagagctactcctgagccggtatgggaacagctccggcaatagtgagatgctcgattttgatcgtaccttgactctgccaaacaggctgcaccggcaagcggtgctcttggagcttcattatcacaacgcgtatacgctgctccagcgccccttcacgcgtctacactacgcccacaccagcagcatgatcacctcacccaactcccggcagccgggcgttgagttgcacattgctagcgcactccaccacgcaagtattatcgtcgatactgtatccacggtctgctccatgtccgatattttctacggctggccagctctggaacgcggcgttgacaatcgtagcctacgtccccgctaactcgctcatctccgtggtgccgcgagcgcttgactccctcacgcgcgcccaggccgttttcgacctctttccctccacctccccgaccgccctctctgcgaagggcattgtccagtcactcctcgacagtctgcagaatatgaacgcacagggcgcatgcgcagtcgccaatgatgagccgataggataggacttattcgtgccatcgctcgaggatcagcaaatgtctaacaatctcttccctccgtttatgtccttcgtgccgcaaaccaaggcccccgacctaatgcagtttggtgactgttgatacttgcgcctgacccgggtatccaccacgccataacctcaagggctggaatctcctaattattggtcacaaccgctctcgtatacgcagatgaattcctgccatggtatgaagattctcaccgctaaggaacgtgacgctgggagaatatcgcattacgatagtactttggcgttgtctccttggtctatgaggaggggagggcggacgaggtaccgttgatgagaaccatcctcccgctgaaacattccgaggctctatagtttcatgttaagttgatcgtacacgacacagtttcagccacggtcgagcatactttgaaaacctagggattagcggaaagttctccttggggtacttccggtacttccggcacttccgggaaatctttcaagaaatttcctttctggttgccttgcagcttcgacttggggttgtcctttcgaggcgcataccatgatagagccggaattcactcaataataaggcttcctgtcaccggggccttttcttcagttgattcccctattaggccaaaatgagtctctttttgccgttctgatatcaaaaattctacttcgtatattctgtcagactggaatgggccctctaggccctaaataagaccttggtttttgtttatgggtcaacaacttagtggtaagatagggctgtatttttgccttctaccatgcagatggtcgtagtaccaaatatacccatactaattgtgaacctcataggggagatggtgtatcaaatacatggatttacacagaatcaacagggaattaaccggaagatcatacaaccagcttatattaagccgtggtaatatatcttctaggccaatcaacactgtcgataaccaaaatagtggagaactcccaaggagcaggttttaggagggttctgtcttcacgtgccacccgggaattcgagtctcggctttaccaattattttcaatgagttgctactttgtgactactagtcagttatgagccagcgactattatgacttctgcaggcgtaagcgcctctcatcggaccccggaagaagatctggagcgcgagcggatccgtgatttgtcgaggtttgtggcgtttggccagtatccttgtcccactgatcaccactgatcatttccataacagatattattgtacagtcagtcaagcgtttccagcacccgatgcaacgacttttgaggaggatgagacgcctgcgacattgacgggagatgaacagcccacaggttgcgagctagccaaggacattaccctcaacgcactcgctcagctcggtgtcctccgcttcaatgccaaccgctccttcgtgtccataatcgacggcgaaacccagcatatcatcgccgaagcgaccggctcagtgtcgctacgagataagaatcgccacaaaccaggagatggtatctatctcggagcgcggtcgctagacctgatctggggcgtttgtccccacaccgttcgcttgttcacaggccgcgcgacggacgaaatctatactgataatgtaaccgccaatcgaacgcgccatattattcgagatttcaccctggaggatcgcttcaaggatcgaccatatgttctacagtggccgcatatgcgcttctacgcagaggtgcctctattcagcgcttctggatacgttctcggctcctattgcattgtcgacaacaaaccacgggcagattttggagatgatcaggtcaatgacctccaggaagtggccgacgccattggactgcatctggagaatgtccgaatgagccgggcccatgttcggactgaaggattggtcaaaggcttgacagatttcgttaaataccatgcggactttgatcctaaagaggcctctaaccgtggccgtcttcagtctggtgttaatgcagcgaattccataccacatgaaattgccgtcaccggtccggtgcttgatgtgccattgggtcatgatgttcgatgtgtttctcccaagcccgaacgatcgctttcctcagccgtcacgggggaaggatctgtgtttttctcgcaggatcaacgctctacgaccgaactgtcatctctatactcggggttttccgatcgaccagtaatgctgagtcccggcgaagaaaagtcgatgggtgaagtattgaagtcagtagatgccggtgcagctccaggtgtcgatcaagagttctcgcagctatcattaacccagggcactcccatatacgaacgcattgcatctatatattcgcgtgcaagtacattgctccgggaatctatggacctggacggggttgcattcctcgatgcctgtccaactaattttgcgttgtgagtacatccatctttctattgcgtggtatcttataacatttcttcgccagtgtacccaaagagccagaagttagggagccgtcgatagctgcagatcccgggttcccggctgctccgctgcctatccctcttgggctagctcgggttgtgtcgcatgaattcgaccttccgtgcgatactttgagttgtgcactaaagttgccatctaaaggcaatcctggcccaaataatcaaccacgaataccacagggattgctccatcaaatgctcaagtctttcccccaaggtcagatcctaagtttagatgagcctattgacgaggatgattgtttctcgaatgattacactagcgactttgattctcggcctgatcccaacactcaaacctgtgcaaaacaccttgcacggtgcctccccggtgctaaatcggccctgttccttcctttgtgggattggaataaatgtcgttggctttctggggtgctggtatggactacaagtagttatcgagctcttgggctggaggagttacactatttcaaggtttttggtgattctttggtttctgaagtttctcgaattcattgggcaactaccgaaagatcaaaattcgatttcatatcctctgtcagccacgaactgcggtcgccactgcacggaatactggcgagtgctgaattattacatgccagttctcttagctcatcgcaagaagagatggtgaccatgatcgaaaaatctgggatgacgttgttagatacaacgaatcatatgtgagtccacccgagtagacattggatatagaaaatgtactaatacgccctaggttggaattctgcaaggttaacaatttgagccatacggacaggatgaatgaaatgatcccagaaaatgacacggccaatcttatttccgattttaacattagccatttggtggaagaggttgcagacatattgtacaccggtcagcgagcacctgagcaggtgagccagctcgctaaaaggatgtcgtccaacaaggaagcatgcgattcgatcagcaaggattctagggcacaaaaccaactctctgttgtcgtacgagttgaccaaacggacacctggatgattcgctcccttgcaggtgcctggaggagaattgtgatgaatcttctcggcaatgctatgaagtggaccacagccggcttcatcgaaatagcgttatccaaagtcagagaccgatcggactcccaatcaccgcttgtgcatctctctattactgataccggctgtggaatcgcgcccgatttcatcaaacacaaactgttcgccccattctcccaagaagacccgctgtccgagggcgtcgggctgggtcttagcatggtacagcaattggtgatgtcgctcggggggcatgtcaatgtaaggagcgagataggccttgggactcaggccgatgtctacatcccggttcaatatctacctgctagtattgctccggaggatagcctgacaccgacaaccactcagccaggaactaccccaatgcatgcatgcttggtaggcttcaatggttatcctgacctcacagaggctcccactggaattctcaccgtcgaaagcaaacgaaatctttccattcagagtgcacttgcaaatatcttcatgacaaagatgaagtggagaatttcgctggctgactccatcgacaaagctcgtggccaggtcattgtcattgaggaggaactcctcagacgaactatggatgaaaatggtcaacttgtgtcagaaatggcagctcaaaatggctttgacttcttcatcgtgctgagcggcaatgtcccaatcatactcgacagtctctctgtcaacatcatccgcgttgcccaaccgtacgttacaatttctttacaatttttgatatgaaaactcatctcttttgcagattcggaccacagaaaatttacaaagccgttgaaaaaattatgaagtggcgcgaaatccaaacaaaagcctcgtcccctgcgcccgaagctgctttccaggtcatgtctccaccaatacaaagaaaaatcagttcagactccgactctgacgtctgtggtagagggacgtccgagtactcgaatgaagcaatgagctcaccgggaggatcaagcagctccacaccccgaccatccagcaagcaagcactggctcatgtgctcattgtggacgacaatgaaattaatgtcaaggtactgtcccacgtcgcttccgaggtctgagcaccgctaacacaaactagatcatgtccaccttcatgcgcaaaatcaactgcagctatgacacagcccacaacggcctcgtcgcattggagaaatacaaatcctcgaactttcactatgacttcgtcctgatggacatttcaatgccggtgatggacggcctcgtctcaacgagcaaaattcgcgaattcgaacgcgaacataatatcagaccctcttgcatcatggctgtcactggagtttcctccactggcttccagcaccaggctactacggctggtatcgataactacctcatcaaacccctctcccttcgcgccctcagaactcttatgaacgtttcatgataccatctatttgaatttagaatggctgatctttggccctcattgcacagcgtggtgttggtgggtttttcttcggtcttccgtgtgtatagaaatgaacacgctatagaaattgcgtcctgccttggttccagtacgtattttgatgtgagtttctcaacttgtacaaagataagtaggttcgatgaatgtgagacacgccaaggatccccgatccccatgtctcacaagtacgatgacccctgtacttgtcgagagcgaaccatatgccgcggatatctctgctccgtctcggccttgccaatatttaccccgcgcctctcgttgatcatgtacaacgcatgtcatattttgtacatcaagaaaagctcaaatgaaccacatacctactggttcagtaacgaatgcacagtggaaatattcacccaaatatcacaaaattgtctcatttctcatttagtctgttaggatttgttaattgtatggttaaaaaataacgagccgcgtgagagtcgagtgcgtccggggcctatcgcattgttgcattggggttggggtgttgaaatcccatctttatgtcgcgttggaggtgttgaagagccatcaattcgggctgcaagggctgtgagtcgctcgggctttgcgtcatggttggcatgggtctcgttcagtcgcgatcgatcttctctagaatgagcaacactgccttgtcgccgtgtccctttacatagtctataagttcctcagtaactatcttcaccaggccctccgccaccaacttctcaacctcggcttggaaccctccagacacccagatctcttgcaaaatcgtcgagacaacgacacccttattcttcgcgacccggacgagctctctcagagcaggatctggcccaacatgaccaagagtgaaagttcccacacacgacacgagatcgtatgttccatccgccttgtcaatcgggcggttcatgtccgcgactgtgagatctcgatagatgccagtctttcttgcgacagaaagcatggcgggagacagatcaatgccatcaattgccttggcctgggccattgaaagagccactccgaccagcccggtcccgcaaccggcgtccaatatcacgctgtttgtggcgccgtttgagagcccgtgtttgacggcggcttgagcgacaagcacgggagcaacgtagtcctgagcactgtctccaacttcatcgtcatacgaggctgcccatttctcgtatagagccatgcaatcttcggtgctgctgctggcgcgggcttgactgaggtatagttcgctggctgagcttgaggccttggcctggattggagttggggccaacatcgtggatgattgagattggtgccgtagaaggggctttgttaaatggtttaggagattgaaatattgcgtgtgtggttgcgaagggatcttggtatttctgccctaagagattagaactgaatgagttgtagtccattcccaagcctttgcggtattcttatagtcattggacagcacttggacatattctagaagttatggcgtgatgcggggttattgatgaatggacctgaaaagagtgaagtttggtcgatcgatgatgtcggtggaacataggttcgagcgtgctgagcctgggcctgggcctaggcatgatgcatgttcctacgctgagtatctacgcggttgccgaggtaatgaatgctcatttttctaattcaattatccgcagatggaagatatgaaaagcagtaatcattgctgttgatctgaggctctgccttgagtcgtaggcaagactagataatattttgtcggacctttcttcctctctgaaacacaattatccaccagtcatacatgtcatagggatttgtacttggccaatcatccgatctgatctggacatgtaacctgttctcttgttctcatccatatcccccataaattaagattagattgacgtggagggccccaccggggttaccattatagcgtcgatctatttcctagagtggcttggctccatcttagcctcaatttattccgaggtcgagtaatatggggtagctgtggagtgaccaacctcgttttcttaccagtgctccttgcgtgcacccatgcatcattgcctagtgatgattgggtattaacttttcggaggcttctaggccaacattacagttcaatccaatagcaaataatgctagatgccaagtgagagtgagaataattttgccgcggtagccagatacactgaaggtcagtgataataccactctgtcggactctgtagatcctgtttgtgtttgcagatcacgtgcatacggtatttttcattttcgacattgagttttaagcctccgtggcaccttccgtttcgggaaccgaggtttcccttcatcttccaacgaaagtctagatggagtaggaggtattattgactatataccaagatttatgtgaatactcacacaacagagcagctgacttgacattgaacagaggtaggaactactccgatcgaggacgaatccatgcctgtttcgcagaagggcctcacgaatcgtcttttgaggccactcaacagggttgagcccgggtacctttcatgaaatcttgaggaatcttcacgatacatggcttcctattgaggctcagcagtgcatctatgggacattgcccttccgagaaggaaatgtgctggatcttttacatagttggatctgtcagcatttggaggtattcatggtggcttgactgtcctgtcattgtcatcatctctaatgtctactttagggggttgtaagaccactttctcaagtctttttcgatgccgtcggaaacagatcgataacgagaatctaacggacccgaatgattggaaccacgctttcgctggtgaaacaaaatattccgagaagaccctccgattaatcggattctaccttcacgaaacgaatatatgaagagtttggaaatacctcgaggctccccaattcttggtcatcttcggtcgccactattgccgtttcatatctcttccagttacaagtcgaaaataaagatggaacgacaacattcgatattatttcccttgtgtacacaatcttcgagattgccgcaggtcattccaccaaatctcggcgtaagcatgatgcccatgttcaaacccgctacggccccttttctatcaagccatcttggaaatggaacacacaactatggccacacatctcgttatgggagcaccgccgagcacgggcaaaaagaaccgcatctttgaatcagaggactgtcgatcaggtttgagttgtacctaaggcccaataatctacacaccaggagacagtacaattccccgacaatttctccctcgggcagattaggaaaatcctagctggcgctccttaccgagcaaagttatgctttcggctgcttttgttccctaagagaagtgaacagttgcggtgtttctttaacaagaagttggaaaacagagacgcgtcactttatgtacctcaataatattgcatgcaacttgtcatatatcgtaatatgaagtaatcaataaagaccttaaatcaaagattctctgtccgctccacagaaattgtttcccgtccaatcaaccacgagttcgtgactgccactcatggtcatctatcaaatacatagcactagtacggagttcgtatcacatgcaaccaaattgcgatcttgtctcctgtgcacgggccataaatggtaatattaccagaataggaacattgtggtacgctatgatacgctggaaattacgagatctttgaactacgaggtcttcgttattttcccacaatctttctccgccatcatatgtccaccttttgtttactctatctactttttgataaacacacctcatatgacagtgacgatgggcaagatgagggacaactcattccactacttcatgcggctgcctctggaactgcgtcgcattatctggatgcactgtctaccgtatcgtattgcagaagaagacatccctgaatgccttttcaacggctgcgaatccaaccaagcctgcgacacccgcaagacgatgaaacaaaacgcccagcagccgaccatcacattcgttaatagcgagtcttggctggtcgcactagaacagggacaaatattgaaatctgttgagatcaatactctggagtcaatatgggtacagccgcatcgagatgtactgcatcttaactggatacgactatactacactatctggggagttgatcacgatgctccgggtagggctgacgagttcctattgcatgcgaaggatcttgggatgcgtccttctgtcatggcggaacttattcacccttttaacttgaaggcggtgttagatggcggtgatggttctgatccgcccggtgacctgtcgccttttcatatcggcgtatctgtcatgccggtgcttccttatcactgcatagaaggtgatgatatgcgcgagatggtcgatgttctaccttgggcgaaaggccaaagaagcatgctagacatagccatggcgggggtttctctacatatcaccagggaagcagctctgagatctggcctgtttggattattgggtgatgcgcctgttcagatgattgatgttgacgacagggctcggttgagggagtttgaagcattattcagggaacacacattggaaaaggaaccagccgtgcaaaagctattcgatgcattcacaagctcgcgattccaaaaggccacggaaaaatggaaaaaaaagctgaatggtatatcctggcttacatgtggcagtcggcacgagacagagagctcggcattcttgggacgaacccgggttctgcttggctacctcacctgtcagaggagaagaatatcagcatgtctcagtatttacccgatgagaggcatccgtgggtgaagcaagctaggcaagtcgcccccaagctgcgactgcggatcatggtgcggtattgtaccaatgagtgttgcataaaggagctacgtcccgaattcttcgggtatccataagtagtacttatttggtaaagagatatttcgagtaccaattcaacagatagaagaatatgagcggctttaaaaagattctctcctttggcggatgggcgttccacagagtcgggcacgttccagcgcttcagagatgccactaagccagagaatcgcgggacatttgtcaataacctggtgagcttcgtgagctctcaaaatctcgatggtttcgattctgattgggagtgatctggtgcacctgatattccgaacatcactcccggaagtcctgaaggaaacaactcccttgctttcctgcagttgctctgaagctagctgcccagcggaaaatccatttccattgcgctcccgacttcttactgatacttgaagcagtatcctgtaaaggatgtggcaaaatacgtggattactttatttacatgatgatgtatgacttgcacggccaatggggtaagtaacacagacttgagataaaattggctagaacgacgtgctaggaattagagcggtcgggataagcgaatcgccgttccgcctcctgtggacacttggagactgtaacggtactcaaatgaccccaggaagattatagcaagtgaaataattatagaaactataggcctaggaaagccgcgctagatgtgtctaccgctttcaagtgaagaaacattcaatcgcaactgggtctgccagcgatacctgcctggtagagagggaatccatccgatgcaccgttttgctggaccaaacctagaacagacatggctaagttctccaggtgtttgctcatgtggaccactagcttcttccaattatcgaaggtatttccacaaaatcgacacgactcctgtgacgtttgtttgatctcttgacgacactgctcgactatctcccacagtcgatcgatatctaagtctcgttggacttcagaatgcctctctgaagtgagatcattggatttcttcaccttcggctcgagcatcttgtgctcacgaactagatgctggacaaaattgtctttgcgaaagcactttttgctgcagtcggagtacgagcagacccaccactctgactgccggtgcctttcggtctcgtggcgcacccagtccgctttccgtttgaatgatttatcctcagagcagtcggaaaatgtacatgtgaatggttgcaaatctgcttgaacatgtttcgaccagtgggatggtttcaaaaacttcttgacctgaaagcagatggggcactcgaactgagagggaaacagcgagacaggaggaatgggaactgcaggggggaattcagccacaggcgctgctgtttcgcccatatcagagagccgatcagaatttcgactaacgtccattccctggagcaagcctgaggggtccttaggaagctgcaatgaggattccccgcctcccagagcaaaacaatactcgcctgagcggcacgagcggttggtgacagcgtctatatggtttcgctggaaattaacaagaacattataccggcgaagctgctcactcgcaaagcgatggaccaaagcaggctccagccgtgggtacaaatgcagaatgtgctttttgaatccttccacggtagggtcgatcaatggtgagacagcaaggaagtccatcgcaagccctgggttttcaacaaggctgcggatatcgctatcattgtcttcagtcccttcagtatcattacccctggctgtatgctgcggtatttggcctgaatagggcccgggatttgcacactcgccaatatttgctttccccttaacaccaggaccaatcgccgtgttctccaaacccttgtgtagggtcgccaacagacgggaaaattcggctgatttagggagcgagaagattgtcaatcccgagttagtgtccacaatatatggatctgctcccgcttggagaagaagctctgccgtctcatagtttccccgccagcatgctgcgaacagaggtgtggatccatagcgtccacctggagcatcaacttctgcggaaaggacagatgcaagaatagctttgacgatcggaaccaagccgaatgaagctgcatagtacaacgggttcgttgtctcgatggctacagtaggtacttcagggataagtgcctgcacccatacgccaaaattacctcgacgaggaagatattgagaattaaagaatttgttgacgagttgatagtcgcgatcatcgaaactgcatgatccgccatgggtagcccagaactgggccgcatattctagaaatgggtgctcgtgctcgcgtgatgcgattgaatcgatggagcttgtatatccagacagaaaattatcgagacacaaataggtaaggctgagtcgcattatgatttgatcggcggtttcgtgattcaaactgaaatatcgcacgctagaggagcggatccactcggacgttaggaaatccttgatagatgcgtgagataacttcacatttctaaactcatcctgggtgatgagtccctgacaaatatcgagaaggatttgcggcgaaaccagccttaagtcgtcatccaaatatgtgcacgtcttctctagtatgactgcttcgctcaactcgggtagggtgagcgaacgttttgagaaactgagccaaaagagggcgttgcggctgagttcccagtcacttggtgggattcgctctaagatgtgtatatatgtctctcgtagagtttttggcaatgtttgcaatgcttctcgaattgacttggcggtccgaagtgagccgagggtttccaaagaaagctgggtccagcgaaatctgcaaaaatgggtcagatacgaagatagtattttagtgtgatactgacgatccatcagctccttccagaatagtcgtccaaatctgatcttggagacgcgtgctcagattcctgagcgtctcgtcttgctgcagtctgaagcgtatgaatacgtcgatatcgtctctgacaatttcagcattcatatgaattacattggcatgctgtccggggatcagattggccgttccagttatgagaattcgaaggtttggggccaaattcgagattttcagaagagaacgtattatgatctctttataaacactctcattaattgcatcaataagaagaatgactcgtttaccaccagagctaatcttgatgatggcatcttcaatggcaccaatgtcgattggacgtctgtatgcacttgactttgttgtcgctttgaagagcggccagatagactctaataccgagggaatcgattcagagagctggactaggagcgatcctagaatgttcaccggctcttgaaaggcagtgtcgtcaaatttacagtagaagtaggcaaagaccaatctatggtcatttgaagacatccgtaccagctcatcgacagtatgagcactatagaatgttagctcaataaccactcaagaacatggaggacttgcaaaagtgttgtctttccgattccagctatgaaaaggtgttagactatctcagtgtataatgggtcagggcgtacatttgcctaagaggacgaaaatgctccgatgagtgccatcattccatagccagtcattcaaaataccatcaatgaaccactttcctgtgtgatttgctcgcaaattcgaggcttgcagatggatactacttgggctgacaggagccaaccatcgggaaagctcttcgtgggctgtacggatcatttcatcatttcgtactttcagatcttgttccagagattttgcgaggcttgtgatttcactgtgcaaatctcgctggaggctattgctatcacttgtgataacaaggatcaaccaagattttaccctttctaggcgggtgaggtgcgtgttgagttgttcctgggtgaacggccattccagtttttgcttcactctcttgaatttgttcgctggctctttaatgtctgaaaggagaacttgaagagactcatttgttttttgaaggatgctcatcagaggttctggggtgataagagacagtggtcctaattttgtaggtcgtggaggctcaacttccgagtgaagatgttctagaattcctttgagagcgaaaagctcctcacttaatcttcgaatatcggagcttgcatcacgtacgccttttgcatatgctatgaggcgggggatgatgctgctaatgtcgatgatcagcgacgttatggaaatagggtcagccatggtttccaaaacaatgaaatgccatgcacatatttggaagtctttcgaaactgggaaatcaggcgggctgcccttgtcccacggagtgcgtagtgacgtcaaatcggttgagaataatcttgtaggagcgggttgaaaaaaaaactcgctggtggacttgggggcggcaaggtattaggggatgcacggatatcaaagcaagtggagacaaataagccaataacatctaataactaaggtgatgagcagagaagtgagcagatggagtccttcctcacatccctcagcagtctcccaccgcttcctgccaaagctctcctccatcaacatccagatacctccgtaatggcgccaagactacctctttcaaagctcggaaatattcagaatatgatatcgaacaaatcactgactgccgcgcaaatggtcaaagctgctgactgcagtaagcgtcttatcatcaacatcaagaacaactttcgccggttcgaaaatgtagaaagttcgagtcttgtcacgaagacaaaacataacacctccgacgaaagaagcactgtgcgatcgcctcctcgaaaagcctgggctatatttggatgatattgttacgatctagtgatcgcacttcgcatgtatttgtactatttgcattttcgctcgtagataagtggatgtgatgaacgaactgatttcagacggacaggctggtctccgttaggcgcggcaccatttcagatagctattattccatcgcgacaatcgtagcggtaccagatactactaagatggaattatgctctcttctatagcctgatggttggtggtttatattaatcaactcagtgagcggtcagtgtgaatgaatctcacagacacacgaattgtccaggggtcaattgtgttagctattgcaagtgtactggtgcacgatatccaggaaacagtttctagaggatgaactttgatttgctgatgaagcctgtaagattgccaagcctacctgttgaggtgccaacagccgtgcactgccccggggctcgtgctcgacatcttcgcccttttgtacatcagcccccctcttcgtcatcctccaaccatgagttccaatttatatcaattgtataggccgtgaaacgcaatgtctgggcttgaaatcgtcggggtcgttgccagcaccttccaactcgcagagattggaatcaaactctcggtcaagctttgttccttttaccgccagatcaaagatgcggataattccgcacagcgtcttgcaagtgatgtctcactcacttgcagtatcctatatcaattaggcaagatcttggaacaggacagccagacaaagctttgctcccagcaggcctttctgacggcccaggaagtcttggaggaatgcgagaaaatcttcagtcaaatagacgaagcaattcagaagaaagatccgagttctggtaaaagcaaatgggaacgtggcacacggaggcttacaattgtgatacttggtcccgatcttgacgtgttgaactcacacttggacaagttaaaatcgaccatgttgctgatgctgaatgtgattatgtatgcaagagaaattaaccggtatgtctcatctaaagtatctctcgagatccacgttgttaaactccattgggtaggacatccgatcattcttcgctcgaatgccaacgccagttgattgaaacgcttctccgggagaaagccgaaactgaagctaggttaaagagactcatcaatgtggccgatattcgttcagattgcgatggagtgggtagattgtcgtcttcaacactgggtgcgaaacctagcatgagagtgtggcagcgaccttcaaccggaaacgaaattgacaagtattatgaccttgtcaaaagtctactaaatcaaatcgatgcttgtcaaataaactttcaacaagatcgccatttgaggattagagatggagtggtgaatgttcacaaggccgaacttgccatatttcaacaatcccatggaaaggcagcggcacaggcttttgattgcccctatttcagaattagccaccgaggaagggacagttcttttaccccaaagccgaactccaacatcccctctcaaacggctgaggcgtcaacgaaacgatccaccttgatcacattgggaaattgccattcttttgggcgcagccccttgcctgctattcgtcgagcctccaccagtagtttggatcttgaggccgctcataaaatgtcaaggaatcaccccggttaccgtgaatacactaaacttgagcttaaagaacctatgggggaaatgttcatcaaccagtccagcccaagaattagaagaaactcagcatccgcagcagaccttcatgaaacttctgttggcttctcaatgtccgatctgcaccctgtggccagcttgggtcgagctcggtctccgggtcctttaccttcaacttccaatcaatgtgtggccccgcgcgagcagtttgatagagactaccctctcaacccgcgctatcctacagcgaagtattcgcttgatcggcctctcagcatgactgtgatggacgagcatccccacatgctgcgtaaagaaagacctaaccggcctcaagggcccccatcaacttctgtgggatttgacaatattcgcgtcagagcccgaccatccacatacgccaacaacggaggccacgaccttgctccaatagccttaccccacgagtctgacgatagttgcgatacgtaccccgacaggcaccgtcggcgtcgccgcatacatcgctgcgagagtgataggcacggcggtagtcgatccctggaacagaaagcacttgatgccagcagttcgaaactggtggcgacctcaggtaaggaaagtcccaagaagcgtgttgcgtgggatactttggaagatctgatgctttcctggacgacacttccccgggatatgattcggctatgagaggacgcacgaagcagatgttgaaacgcgtcaataatgccttattccgtattttgtgccacccaccctcgctacgcgaccgagtacggggtatgaacctcaaccagaataatatcttcacgtgaatgagtgcagaccatcttttgcttttggactcttggttatcatagcatgcaaggagttgggttgtagtagaagttatgaattagggcttgggtaggtggcgaaatatatatgccattactatctgctgagtgacagtgttggatatggaagcatcgtctcagcttcacaaattgatctgtacattcccacaatgggtttatttacatctcttttgttatacaaaacgtgccgtctggccataatcactcggccgatcctctaccgtaacggcaactccataattaaccattatattccgctcgtcgctcggatatgccagtttctcctgactgcttgacggactggtagaacggtatgcactcgccgactggtacgactcctcctttcccctgaagctattcaaaggaatatccgttcctctgaaagtacccgagtggtgcgatggtataccagtgcctctacggccccggaggttgtacgagtcatacgggtaggatgtcttggagggcgagatagcagctttcaggacgcgataaaggccggggcaacaaccgatcataacggctaggagaatggcagttagtaaaacgattgaatatgcaagtggaaaagcgggaaatataagcataccgattgatgcctcgatggttccccatagcgctagccatgatggagcgggggctccattttcagtatcacctaactgaacgacgcggatggtggaaatgatgatacacacccagccaaaacagaatagcccgccaatgctcagcttttggcggcttttcatctgcagattccagatcaggcggattgggaggatcatgacttagcgtcgagttagctcagtttaaggaataaggagcatagcacgtacttgctaagtcagtggctatatccaccccgtatgcgtagtacaagctgataacggctgcccgatggtcgcgtggagtgttgcattggcctgcagtaaaccaggcatggaagctcgaacatgaaaaccacgatgagagaatgcagccaatgataaactgaaaacagtgtcgtcagtaatttgaacaccagcattcagacgaaaaatccataccaggacacaaaatcccataataacccaccaggcgataatgtacttctttccaaccaacaaccttttatacatcgccaagagcgagaacttgatcatccacaagcagagccataatgaagatgtcgtgacaaaaaagacagtctgtaatcggagtccatcttccgagatggtggcatagggtggaatcgttccggcaccgactgctgctagtcgaaagatgacaggagagatgtagatatagagaatgctcaattccaagaagaatatgtaagcgataatcagaaggtaatcttcacccttgaggtctttgtaactccgaatggcaccagcaaaacgagtgcctacaaccagcgaggtcagtacaatcaaggcaatgccggcacctttaatagtttcgggcccaaaagtgcccgtaatggcctctcccatcctttattgcgagactgaattttagaaaagtacgacagggaccgcgcgggcccctgtcacccatatacatcgagccatttcaccagaactttaacgaacgcatggcggccgatatcttgagtttgagattcacagatgggccacctacagccaccttgtgcaaacttcgaggggtgcatggcttagaatgaacagggattgtaaaacatgcacgaggggcaatatacgaatctctttcgaaggccattgttgaagatgcatgccccgccagccctgggccaatgatagaagaaatatatagtgccggtggggggagggcccgcgccctcagccacggcggttgtgcctcccgtggccattgggggagccgatgacgggccgaggcgcacatggaggggcctgggagagagaggaaagaaacagatctaactagacaggcccatggcgtgagtcagtatagccgtatccagagaaagattatccagttgatcttgaaaggaacaaaagacaggacagatctcggttaatgccagaaggctggggtgaaaattcgaattgagtttggacttctgaaactaagccctgcataagccccggagccctccggaatccgggcgatggtgttctgcgttggccgctcgcttagaaaattcatatcccctatcttttgagagtcacttgcgacttgaggaaaagaaagaaaagaaagagtttgtaacagataaatacaactttacgtaagaataagatggacgagcgaaacaatcgctgccggtgaatctagaagcaaacccacaagtccattgttatgagcttcaagctatgtagcttaacccttcgggctgcgccgcttcgcttagatctggaagcgagattattatatatacgcgttaacgaaagcgaatagcctagtcatactatacgccaattatacggccccgttgattagttacttaatgacacctaatgcatctccggaacctcatcggatcagagcgcaggggaagttaaaaaacaataagctccccccaccttagtttcttctccttttttctttccaagccattgaatttgtctatatatcacgttcgtttctgtttgggttacttgcatagcttttggatcatgcatatttcgacctttattggcgggctatccgcgatttgcggattgaccctagcccagacaactgtgaccagcccggtcatcgaagcggatgatttcagcgtcactggcgcattggaggatctcggtgtggatgtgtcgcaaattcctgcattggagtcattcaccgccattgagacacggtcaaccgataaggcctgtgcagctgctgtaagtaagctcgcaagccatcgagcaataatttattctaaatctctcttagtgcgcaagtttgggattcctttttggctccaaggttgctgctcaagatactactgggtacagcaacttcactagctcgttctggtcagtgcagcaagaagaggtccagcctcgttgtattttccgtcctaccaagaatacggaggtcagcactgcagttttactttcccggttgacaggctgtgagtttgctgctcgcagtggcggccatgcggcctttaccggggcttccagcgcgcctggcggaatcagcatctggttcaaggatatgaatgccgttaccctgaacgcagacaagacagtcgcctcaattgagcctggaaataactggctcactacctacactgccctcgagccttatggattggccgttattggaggtcgtgccgccagcattggtgttggtggctttgttttgggtggtggaatctcctatcactccaacctgtacggatgggcttgcgataatgtccacagctttgaggtaagaatatacatctgtcataccttttgccgaatgaattactaacaaatcctgtttaggtcgtgaccgctagtggtctgattgtaaccgcgagtgaaacttcccacgctgacctatattgggctctgcgcggcggtggaaacaactttggccttgtcaccaagtacaatatgtacaccatcccctcgccaaagctttacggtggtgccagaactttcctccagaccgagtttcccgaggttatcaatgcttggatcaacgtgatcaacaatgccaccattgacggcaaagcccagcaatacgtcgccttcctccggacccaagatatgaaccttgcctctgctgagttgacctacgtgcacaacgaccccaaccccgaaatctacaagcaatacagaagcattcccgccatttccgacacatctagtgccaagacccttgtcgagtacgtcgagtaccttgagagcgagaacccattcggtcttcgcgaggtgtactggcctatcagtgcggctctcgacgagaaatttgccaactgggtggtggatctcttctactcgatgatctctgaggtggccgatgtcgccggcgcccagcccgtgctcatctaccagggaatcaccgaggccatgttgaacaatatgaagaaccacggcggtaacgctcttggactcgccggctcatctggccctgttcaccttttgcacatttcttgctggtggacgaacgaggctgatgacgagactatctacgcgtttgtcaacaaattcatggagaaggtcattgctgaggctaagagcgtcggagtcttcaatgaatatgtttacatgaactacgccagcatgttccaggatgctgtcgctggatatggtgctactaacaaggctcagctgaagaatattgccaagaagtacgaccccagggaggtttaccaaaagctccagcctggttacttcaagcttgatggtcctcctgtgactccatctttctagatggacttgacgagaaaaatgtacatcatctaccgcgggatataactgtatgtagaatgcatcttgatgatagcatattatctatatcataatttaatatctgtgaattatatacatattgattatatcaggaggcttgaaggatgttgtagaaaaaagaagcggctcgggtagaaatccacggttccacaaatggaaaccctggttccatcccgacatatccatgggtcatggtcaatttgcatagttaatgatggggctgtacgacgtcgggatgggtcttgtttcccgggcggaaagtgtcgggcatacagaagggtttgaggaaagagtatgggggccagtcatcgggccgaggtggttgctgccgtggcgagaaaatcgagagaagatgcttgattctagcgatgcatctgacaaattcatggaggttgtaaagctctggcaagacgtccggcccaacgcccatatatagcctcgatatgatggcccgggattttggtatcgggattctgcgtattctccaaatttctaaagtgaggctgtacgtgatgatcatcgcccgggtgtcctctttcaggtggatcccaatcttagttagcccagtcaagatgctccaagatgttaggggacttaacaggtttacgagtcgacattccccaagtgcgataccagcccctggagcacctcgcttgtccatttggttacatgggaaccagatcggcgaccatgactcgaaagctaaacacacagcttgcacttgccctcacgcaacgactgcatctgcttgtgtcatctagctcacaccacaatttaaggttgtggcaccggtcgcaggcttgccgcgagcgctattcggacatcccactccgtgcttttggaaatattcaggagtggatgggctgagaaatgcgagaagccaacacaaactggggtctatgtagcttgcgctgaaaaatggctcgagttgatggctgtgtctgacggtgtgaggaaacacgagttggagtctggaagctttccatttggcgacgtgtttctcccgtctacccgcgacccacgtgctgatctccctttcgggcggggtgtacctcgataactaagaaatctacagcgacggaactaagcaggtcagacaactttcaatgatattctttagcatacactttacatctatatatttagcagcatgcccaggtaaaggagaccttcgtggaggtatcacacatgtgtatcctgtagataactaagatattcctagttaggaaagtccgtagtcggaagaacctggcattagtcctaattgggaccactcggcgactttggaccaatcacaggcccggattccctcgaccggaaaggggaacatctatatccatggatatgttgtacaacgagaaacctcccccaaccttcagcgtcggcttgttgacaaacgcgtcgtctctaactccaaaccaactctcggtggcctacttttcaacgtgatccgactgttactaggatattattttcttcgttcacaacatacaacattggcgtgacttcccagcatgccaaacactttgacagcatcgacactgcccattgaggacaaacaggggaggggatggcgcttttgggcgatctacctctcgctttgtgtgtcaatcttgttagctgcggttgaatcgacggtcacgtccaccgcgttgccatctatctccgatgaattgcatgcgggaaaggattatgtttggtttgtcaactcgtattttctcaccaggtgagttgaaagatgaatccaaagacttcgaggaagctgatctgactcttcgggtttcaagtgcgtgctttcaaccgcttttcggacagactgcaaatatcttcggtcgacgatggttgatgatcggcgcggtggcatttttcgtacttggcagcggtataagcggtggtgctatcaactctgccatgatggttgctgggcgagcgattcagggcattggtgggggaggtatcaacgtcctgatcgagctgatcgtcagcgatttggtcccattgcgcgaacgaggaaacttcatggccatgatcttcgcggtgttctctattggaacatcccttggtccgttcgtcggtggtgctctagtacaacacagctcctggcgatgggtcgtgagtgcttaatatacttcacaccaagtcaagctcacctagctaacccatgcatcaacaatcaacagttttatctaaatctcccaattggaggaacggcactcgttcttctgttctttttcttacacgtcaactacaaacaagagccctgggaggaaaatatcaagaagatcgattatctcggcaatgcactactaatgacgtccatcgtctctatcctactagccctcacctgggccggtaccgcctattcctggtctagctggcgcatcattatgtgtctggtgctaggatttgttggcatggtcatattccacatttacgaggccagcccttggtgcccagagcccatgatgccaccgcatattttcggcaaccgcacctccttcgccgttctgattttgtctttcatccacaacatgctcaccttctgggtggtctattttatgcctgtgtacttccagtcggtgaagctctctacctcggcccgtgctggtgtgcaatttttacctaccgtaatccttgctgttccgactgctatagtcggaggtgtcgtcctcagcaaatggggcttctataaaccaattcacatctttggaatgggtctgtcccttgtggggctggggctcttcacactccttgacgcagactcaagcgatggaaagtggatcgtctatcaaattatcaccgccataggtctgggtatgctgctcacaacgatactgcctgcagttcaggttggcctcgaagaaaaggatgttgggctagccacggctacctgggcatttgttcgtagttatggtgccatctggggaatttcaatcccggctgccatattcaacacacaatttgggcgactgtcaagccgcatatcagactcttctgttgctgcacagctgggaggtggagaggcatactctcatgtatctgcaaatttcatccggtcccttgagccgcaagttcgcgacgaggtgataagtgtgtattctgatactctgaagctggtctggcaagtgtctctgggatttgctgctctaggattcattgtcatctggtttgaaaggcagatcaagctgcgcaccgagttagaaacagagtatggaatccaggtcccgaaagaggacaaagacaacaaggaagctgttgaggcataggcagaacttcaatgaaagaattcgtctatggccatgggggatctgctctcggatattgctgtagcaaacaatgccacagaaaattatttcggcatcgccttcttaccatatgtgtaatatcatacttactttgtcttttcttcccactcgcaaaaatgcatatcctcaatttcaccacccttatggttctcatcaccatgtactgtgcattcgtctccagccatccaagtccgacagatctctgaaacaatgagcctatggttatggaatcacagttacatcccacaggcaatggcagtctcataccagatgaggctcttcaaggcaattatcttgcagcaaggaacgacgatatggcaattatgatgttgctaattccgggggaatgcaagacggtgttgaaaaaggccattctagtatcgaaagcggcatttgagtggataaagaaaaaagtctgtgaagactataagtgcaaagtcgcattcgcgcctacttatagaaggtaccctgatcttatcaagaatcacattattatggactggatatttggcactatgaagagaaacgaccatcctattcagaagcttggcattcatccagatgagatatttgacaggatcgttaaaaagtgcatcgagggagatttaaagatcatgggaattaaaaatgtctgttctgccagccaagatagcttcaaagacatcaaatcatgcgttattagcaaagtgatggagtatgtaccccagaagacttcataggctaggaaagcatatataattgcacttcaaaagaacctgaacctggttgagaagacaagccacctaataagggcagctgtcatagttgagtcttatatttctttttttcaatgacttggttaagctgataaatatatagatgaacaaacccgttttcaagccgaattggcgcaaattggtatctgatttcaagaacaacaaactgtgtgggaaataaagacatataaggcgagtgctaggaaggcagcatgaataactacattgcacagttgctggctattgaaaacagtctgtttaggagaggcaagggcagatgcaggtatatgataaaactttctattctgactactcttcctaaccattattaggttaattatgggcttatagttatcaaatcatagtacttcaacatactactccgtatatcaagggtcattcgcatctcatgcgacttgaataatatatcgaaatgtgatttcttatttttactttagtttatctatttattaaagaggggttcttaggagaggggcaccgacagccctgcctgcgaaacaggtgtgagagcagagtcatcactgggagtagtagggtgctagagaggagaagtggaagtctgcattgctatctaggcctcgggagtgcttttatgccacatagccgcttagtcatcttgctctggaaacccccactgcattagttagttaacagctaactagttagtcattaactagtaaaagatctcaccaaggaataaaatattctctccaatgttctccagtatcagcctctttgaacttgtcaataccaccgacaacgccgtcttggtccacttgccaatcacccatttccacccgttcagcccagctttctaaaactttgtgtagatatgagctacgcgaatcccaaggtaaataaccactatagccactgaaaaggtctgcctggtaaagttgatcaggccgttcggttcccggaaacctagcatttttgaatggtataccattgctacctcgagcaaacccattgcttccaatgctgaagggcagcaggagtcgactctggttaccagattgccagttgagatttttgtcggttggttctatgtacaaaccagatggaatgttctctgcccttccgtcaggaaaccagggccgattcaagggcgacttgttctccctctcccctcgaaataagagtagagggtataatggtatcgcctggtcggtattatgcaagcctggaatctgacgttcggcaagtggttgatttgtaaattcgaccggattttggagtcgaataccgggggcaatatagcgaaaggcgagacgccggatgggaagagccgagagaaaacattcgataaacgagcccgtttctatgaaagatgccttgataaccagttcggagtatgggagagctattccacaatcatacgtcgaatgtatcaaagttgatggaagtcgaatctcgatagcatcaagaagacgagtaaaggcactgactgccctctccacatccattggggtatattggtgaatctcccaagggaatactccaaaaaaatgatccacagattcctttcgacgatccgaatatgttgtaattttgccctcatccaacatgtctagataggctttcagaatgttttgtaatggccgccatggccaccgttccctatcagaccagatcatatcttcccagactgggacaaaagaggcaagctcagtttcttgatcgaatctatctggcgtataagtattcgtcttccctcaattgtactaaagcataaaaggactctcacactatcccgacttcttcgtcactctttgttcgtgttgagggatatagccacacataacgatcaccccacgatccgagtgaagattccggagcaaaaagttcatgttttccatgaagcgctacgaggtaatagaagagatgaaaatttgaatcagggtcaaatatagtggccttcgccgaccgtaggaacctgaccaagttcggattcaggcgggatgcgagatcgaatggaattggcgagaactcttcccaccaagttctagacgggatcgaggcgacatcccgtccagccccaatccatgcctgtttaaggatctggttgtgaagttgggccgataaatgggggtcaaatgtagtgaatgacatattggctaagacgtaggtcttgagagacgccaggtcgatcttaaagtaagaaataatgcattcaactaaataagtaagatagatagagaagatagagagagaagaagcaggttgcaaagtgggaagcggcctgcttatatggttgatctttgcaaacaaacaaataatgcaaacttcgagcgctcgcttaatctcgcctagaaagcagacattgcaattgtgacagatcttcccggacctcgggaattccggtgggagatgtagaacgagcggagcggtacggagtacttcgacacagataggcaactacctctagagacaattttcgaacatagcacatagatgagctgtttctgccctcttctgatgcatcccctagcatcgtcaaatattcaactgctccggcacagatactcaggactatacgggtaatccaggtagccagttttcgtgagacacgtatagaatgaggagcgatcgtatttctgtagggcgatgccattcttcatccgaaaagggagatcgggcgtggaggtgaagtatctcccaaatccaatagcaacattgtcatagtctgcatacaccatttcaatcacctctggggccgacgtcgcatcatatccgcccgccaggatcactggcagggacctcccccataccttgacaaaggtgaggtggtttggatcagggtgagtcgtcatttggtccaaccaccgggagttggcgaggtgtaagtacgcaatgccgagttgtcgaagctgcaggatgaggtattcaaactggggaaccaggtcacccatgatacccattccggaatactggctccacggggaaagcttcatgccaactcgatccggaccgattgcattaattaccgccatggtaacttggagagcgaaccgtgctcgattcggaatgtctcctccccactcgtcggtccgctggttgcacgaggcctgcgtgaactggtcgatgagatagccgttggcgccgtggatctccaccccatcgaacccgacctcaatggcatttcgtgctgcttgcgcatagtcagagatgtacttctgaatctcctcttcgtctagcgcgcgtgggggctggcaccctggctctgccgcaacagcactgctcgacacctgttcaaaccctcgggatgcgagcaattccgggtcggcagatcggccggtagcataaatctggcagaagatataacattctttggcatgaacctgggaaacaacctctctccaagcttcgcattgtgtcttactccatatccctgggatatgtgcttcgccaactgagtttgggcaaatattcgtcgcttcagtaatcaacagagcccccggatcagatgctcgctgggcgtaatattctttcacaaacggcagaggcacagcagcctcatcagctctatatcgggtggttggcgacatgacaattcgatgctggagctggcattttcctagcgccagaggcttgaaaagcgttggagacgggtgtttggggataatggtcatagtgaatcctaggagtgtctgactcaatgcccccgggagaacttgacgtgagtaaaaaaccagaaacattgctttatcataccttgtagatgagattcgttctttgttgtccctcacttatgcacgagaattgaattccttcgacttcgcgttttgaggcaagggcgccattgagcagcacattacgcgtctaccaatcctaaagcaagaaagaccggtgtaattgctgcaatgtcacgagccaaagcgaaaaccaatctacccatggaaacctgaccgtgtggtgtagatgtatgttcatgtaaagggctgtgagggatacagcgtcgatcacacaagagcggtctttgttcaaatgaatagagcacgaaaatgatgttcaagaatccaacacagccatgtattccaaacagagagtgtggaacgaggcagggatgatctcttggggaaagtccgggcttgatcccgcccgtggaggggccggcgaaggagggggtgtgtcgttgaagcaagggatgaccaaattggagtataaaagtgcactttcatcctttcctggagagattatcctcattgtccccattgccatattttcttgtccatctcaagagccttctcgttcagggcctctgcctgatctggaatttgtcagctggtcacaatatataccagattggaagccagcaaacagcaaatcgaacaagatgagatcaccaagtctcccgcgactgccagtctcagcaagacccgaggccattctcgatatttacaacgattatggatgtgtaattatcgaggggcttctcagttcatccgaggttgcctcaatgaatcaagagattgatcctggactggcaaaacttgctcccggtaaaaacggggtgccgttggaagagttcctgggcataaacacaaagcgattgccactggctccaaatagccgtactttccgcgaggtgattctggagaatgatctgatgcacgctctgagtgaatcgatattatgtgacagtcctggggaagggtatcatatcaactgtgcacaggtgattgagatcggacccggtaacgcggcacaaccactgcatcgagatcaaagtgtatggcctttctgggacctgattccatctccagcaccggaggcttgcatcaacttcttttgcgccttgaccccatttacggaggccaatggcgccacaagagtggccccgaaaacgcatcttgatgtcgacctaaacaacttgaatccgccccaacttctgccagttgagatcaaccccggcgatggatttctcttttccggcagacttgttcatggtgggggagagaacaggaccaatgagtaccgtcgtggtatcacaatccacattgcccgcaagggcctcatgacggaggaagcacatccactatcaatccctcgcgagattgcagagaccatgtcttacaggggccaggcgatgttcggcttccgaagcaactggccgatcaaggatggacccgttgggacctactggtccagtaactttgacgagattggtggccatttaggactaaagtctagctagcgcagaaaatttacttcatttgacgtattggtattctgtcaggtcccaccttaatgcttcggacacgttcgtattttacattgatacacgacccgagtttcaaatcctgtctgtcttaggttttcaagtcaagttgggatgaaatacttcctttttggcattatctaggtagtataatatgacgctgttaacaagatggttctccctctacaatatctctaatttcagttcgatttgctcacactggggcctatagcatttggatgatattatcggtcgtttgaagagaatgctgtaaatacagaatgaagatgaaacaagtcattctccatcccgacccatcaaccagcgaatgagatcatctttgacaagtgcttcaagatccttcgcaggtagcgtgatatgaacgtcccaacctgcttccttttggtcacaagtgagtcgtttcgggagaaaaatgacatcaccctcaatcaggccgaacgaaagatcgaaattgtggacaattccaaaactgtcaccaaaatccagaccataaatatcaagatgtcgccaactagaaaaagcaaggtcggtaaatatcatgccggtttgactccaatccttctggtttgcgatgtatgtcatgcagctctggaaatattttctatccatgtttcgtactttgttcctcactttgcacgccaaatcagtcaggaatcggagttggtctgtctgaattgggcaatcgtgggttttcctgcaagacaaacactgctctggcccggtatactccgggcctggagtttttaatcgaagattacatgccatgtttcccagaaactctcttgctgcggatagctcgatccgaccgcgcatgttgactgccatgcataagtctaggcagtcatatgtcttgctttgagatttgaccctttgtattgcgtccgcaagagccgaagtcaagacatcattgctcgacaagaagggtggaagatcagcgacaggaatagacgcactatttggctggaacatgcaggcgttctttaagacttgagaacattggtatttgagctgcaaaattcgctcactgttgaattcaaagcgacatgttctgagcgacgctgcgtcaaggggaacggggtgtattgccggcgcaggaccaagttctgccgtgtgatcttgggcaggagacgtgtctgccagtcccgcaaatatagcgctctgagctcgatcttgctcgtcaatgatgagcggcagcggggtaactgatgggtctcggcagcatcttcccagtaacgcaaggatttttgccgcgcctgttccgtcaaaaacaatatggctgaacgtcatcgccagcacgattgcatccgtgaaaatatttgcctggaaccgaatcacaggctgtctttcagtcgagggaataagcggtgggagcggacaaagatgctgcttggagtcagatgtctcaagcattgacatgccactctgcacgcctcctaacgcgctttccatagggaatgggtgatgcttgtgtaccaggattgtacggtcttcttttgtacatggtatttggacactctgaatgttatattttccatcgagctctggattaacgacgatgtgcccgagtagaaggggaagcacttttgtcaaacgtgtgatgccggcttccaacagagagagacagtgcgtagaattcgctgtctgaaaagacaatagataggagacatatgcctggggcgctatgtggtccaggggactgaggatcactgagtgatcaaaagaggtagacatgccggagtaagaagcttcgtttgttacttatgataaaaggtgaataactttgaaaatcttgctacatcacggcggggggaaggaattattatctagctgaactcattagaaccatgtctaagttactaagacctacattcaatacactgaaataggtacttttggccattgataacgccccttgcagatcatgcaccaccacctgtgatggcgaatgcaaatcgatatctagctcagcagaccgtctggtaggattgcatagctagctcataagtacgaaatacatgcatcaatttaacactagtctcagtaattactaagccataaatacagggctcaaaaaagcacaccgcaatttcatttcctcccttatctgtgaattctgtgagctgggcattgcttccgagctgtggtatctaagtatgatgctgagaggaagtccatcgtagtcacgatgcagctcctgtccaaagtagcccgggtccgtctccagcaccgatgaggtaatcaggcaatgatcgccgaactctgacccaaaggctttagtgcacacttcgtgtagaagtggttgttgcatgggatatatgtggaaggtcttgctaacagtgaaagactactgagctgcctcatgttcgccaggtagccgtcttgcatcgttttctggccgaattcccacattttcttgcattaatccaccttactgtcgaaggctttgacctgctcatcgatgattagggctctgtctgcttgaagaatctggaacaccttgaggacaggctttgtcatagtcatgggtgatgtggtagatgacacggaggaaaggagggttgggaagtatcagagaatttgcaaaatggtatcttgcaatttcttagaggtttacctttccatgtggttgaggcaacatccgtcagtacctttgttttttttttttttttggccgcgagccgttttattatattatatcgatcaagataaagacgaaatggagtggaggcctcgatcacatttccagactggtagttgaagactctcgtaaaacaaaaaaagaacgagaacaacaagggtagagagttggctaagcccagacgtgcttctcatgctctgctacatccttgaaataccgtggggggtttcccgtcacttccaccacagaattgttgagaacttcttgtgggccattcttgacatcaacttccatggccgaaagcatagctgcaaagtctgcaggtatccctgccttttttactaaaagttcagcaagtccagtttctgtaaggctgcggtggatgatttttttgcccaaaattgtggtgagaatctccgccacctatgtattattagcgtcaaaaggatttatctacaggtattgagttgggatagagtcatcttacctgcccatacgataggagctctggacctaaaatgacatattccgtcttgtgcgatccccactcagtcaagcaatgaaaggcaacggaagcaatgtcgtcggctgagacgaatggaatcttaccatctccagtcgcggttatgatttgattttcgttcttaatccactcgcgagagggatcttctaatagattctctagaattgaaatcaagcttagccatattatcgtttaagattatagcgtagaaaaggataaatcgtacccataaaccatgttggtcgtagtgccacatactcaacttctgccagagagtccagatatgcatggacctgtcccatcgagtgtccacctttctcaacagtactggcgctgagaaggacaaatctttgaacccctttagcgcgagctagatcaacgaattcgatcataggcggggctatatccatgacaggaggcccaactagataaatggacgagattgtacccaatccatgcttcccggcctgttcgaatggtctctcccacgtatctcttttcagccagttgaactggctggatttataggggtcagagggagacgccgagctagatccaactagaaatggagttttggcttggtccagaagtgccgcaagacgactggccgttttaccccgcccacccagtacaagaatagtcatcacgaaagattcttgggtgcaagtttgcaaggaagacggtttgtattacttccatcgaacttcagcggtgggggtatatatgttaacttcatttacgtcgaacaacaagaatccagcagaccgcttatgttaaccgaaacgcaagatatgactacacgtattaccctataattgaaaatggcatatccaagaacagaaaccgatcttccttgctttagccttccaggatcatggtctcgtggatattggcagtgcccccgaggtgggccgagaaggggttgcatcaaatatacgcgtcctgtcgctgtgccctgatacagcccagcgcccactggggctgacggacattgatgcccaattttgaagatcgttctaagtgcagcaccagtgcatcatggattctaaccttggaatatcggttctcgactacctctgtaagaatatataatgagcaaggggcttattgcagtttccaatctccttttttccatcactaaatacatctcgataatttgagacctgtcacataccgtatccattgtcgaaagtgttgtttcgtttaccgcatgcaacgactgatcctccgaatactgtgaaatgaccgtttacgtagacccatcaaaaagtgcagcaatgtcatcttcataaagctgcagagtgggtaccctagctagtgtccccttaatagtccggacaaatggcttgtccttccgagcaattattgtcagtttcggttccagtttgaggagactcgaatcgctgattctggaaaggtacggttctaagctctcaaagaaagaacgccgcccgctttccgtgtcgacattgaccccgtttgtaatctcaaggagaaggaccagatcggagtacccgttgcctcctatcaaagcagcctctacacgcgggtgttgctcaatctcccgctcaaaaggagagacaaagtatcccttcgcatcggtgagggaaacgaagtcatccatccggcagacaatcttccagagccctttacgagtaggatgctgaacccacaaatccttggtctcaaatctctctagctcaggaaaggcaataaatatcggctgcatgacgcattctggtcgacggacaaacaccatttcataaaagtcatcagcccgatgctcaaactcgacgcctgcatgtggctggaacttgaagtaatcccagtcctctttgtcgtccggccgtgtctcggtgaaatgatgtcctgactcggtacagccaataagaggggctaacttggtgtcagagattatttgattccccaggtggcgcgccagaggagcgccggcatagtggacatattccaggcttttcaaagcttctgcgccatccgtgaaagacaacatctgactcaacagtagcggtgtgcatatagcaccgtccgcgcgggcatagcgcaagatcttcgccacgttttctggggattggtcgggaggtggaaggatggctgtcatgttgacgaatggggggatgaagagtaccgttaccatccccacatactaccacggcgttgttagtacacgagacaaatgctattaaaccagacagagctcaaaactcacatgcaatgttggcaagtgtgtataccatcgtttgttagcgtattgatgaatatggctctctgcgacatctggcaagcttgctggagcttctagattggccaccattcgaaatgtatgggtgattggcttaggagggcctaggtgaatatttattgtgattaggcggtccctctcttgatgaacgaaagaaaattggctcacctgttgtgccagagctgtgaaatactagccatgggtcatccttcgcgtcatcccagggcttggtgtattcaattgcaatcggctccgtgtctcggaataagtcatcgagacttggggcatccatgtattgaatttctggtgcatgctcaagggctgctttgatgtcattggctacatgctttgtacttaggtagacttcacactctgcttttcgaagcacgtgtgcatgattttctggcatcatagacaggttaggaagaatcaacttggaattctgttagccgggaaaaagaaacgggaaatcatagacataccttcttctgtaactttcctgctgcgagagcaagaattggatagcgaagatctttgggtccggcatatgcaaaacattgaaaagaccgcgaagatggaggcagattgtgcaaaagccactgtgccgcatgattggccgcatcgttcaattgtttgaacgtgatatctctatacccttcgcacacttttccttcgtcaaccgggatcgaaatccacgaactgtttggttcgtcacgcgctcgctgttcaatcacagatataatgatgcgctttccatgctggacgccgggaaaaggcagatgcgtagactttgcggacattttaggttttctggcgcagacaatgaatggaaagtgcgctgcttaatttaaagcttccacaaccactagcttaggtccgacgatcgacattattgcgtcctagctacctaaatcagggagcgatcttgcatgaaccaagaccctcatcgcgatacaatctggtttttcttttgaaccattgcatcatcgtatgtattaggtgggctgaaattctggagccaacttgccgatcgcgttcccgtcggcccttcccatcttcgcaatactagatgcgccgtgagatatcaagcccatcttatgcaagaattaattattgaacttcgtcttgatccgcctttgaaacaatcgctagtcatgggactggaattcggacgaaatgagatgtgttccctttaactgcaggtgtctaaatttagaggtaaaaggattgacagtaatcgaggaaacgatctgcggtgttcgtgtgtgttcgtgtcgatggttaccttcagtggtatgaaatggtggaccaatttcagcacgtgatctgactaatataaagtagcccagtcacgtggtgatcggcactaaatcacgtgcatctggatcctcagcggcctctaagatagaattcaaagtctctctctatgacaacgaataacatctctaattatcaatttcctctatctctaaaaagaagccgaaaccttaaaacagccatacggagtactaactatggtgatccccatctaacgtctatcatccggtcgtcgccgcttaaggcacctcggctgcaggcggctacatacggctccagacggcctcggccggtttcgggtggcttcaggtgttagttttctccgtgataggaaaccttgttttcgcaatggaagaatagccactacttgtggcttgcctttctactcctactattctcccctttcgctcttacacctcttcaagtctcttccaccttcctgacattgctcatttactcaactcgactgcaaccatggacataactggaatgtggtgaagctaggccacttcgatagcctgaaaatcggggcgttttgccacttcgagaaagcaattataagcgtgcgctaagcctttttggcaattccgtattgaattcttggcatatttccacatgataacaagccattcctaggctcctaaaaggaaacgaggccctatcgaggtaatgcgtataggcagttggacccgtactaggagtccggagagttttaagccgggatgtacatatgcgaggtatcgaattcccgagagaattcttgaccacttaaagacatgtagctggctataaggggaatcctcagtaaacaaacaacacatctcagcactttacactcaccagtgagagtttggataagacactaatgctcgttctcacctatgccagaaaggtatcgatattctcgtgcatgtcttcatcttctgttatatcagtagctcaggggaagaatgatcgtgttagtcttgctgcagcctgaaaggggtgatgggtcacgtggtgattgtatggcgacatcttcgttcagtttgatattcacatctgaaattatgacaccacaagaaggggcgagtgcgtaatagatagggagagaagaaggatgagagcgggtgaaattatccacaacagtcgcgcactgaccctctctgttgattgccagatacactcattcgcttggcatctgcacagaacaacctctcagcccagccgcggaggtgggttaatgctgccttcttatgtcatcagtagtggcatctcacaacgtagtcaagggttgatatatccttccaactgaagaccttttttgtatacaacgagctacaatatacaaagtttccccatgatggagcgcgggcggggcctcctttgaccctacggtctagagcatcacagcataaaaccggagctagaggtgacccgttgcggctaaacatgcacattactgtccctcttgactacgtaaggccatcaaatacaatgaataagaccaaagcaaatatggacagccctacattacgattcatttatccattacggagtcttagccgcaggttcagctggtggaaactaatcagtggctcactaatccgatggtttgatccaacggggcgcaaaatgtgttctaacggggcgtaaaatggtcagagaaactgctcgagcgcgggaatcaaaggagtcgccgtcttggcgaatgcggttatctcatctcctggccaatggtgagagacaatacaagccgacgttgcctccagagctattcgcggcattgcatgataaagataacaaagataaggaagccaattcgacccaatgatggcatatttcccggggccccgacgtcttccttcaggtgtacctcatcaacgtcgccgatccgagcaataggcaaccagttccttctgttgataggacagcacgtcgaactcctctcccgtagccaatcgccaccagaccaagagatatacttcggatcctccgtttaggggggggggcatgtacttttggctttctatagttcgccacttggcagtttcaactcgatcgaaacctgataacgttagaatataaattgcaatgtccccagatcttctctcggggcattcgttgcaacagcgatctttttcatccttaccttctatctctcatctcgggtctcgcacccattgacacgatgtcgggagttgaaaagcctttaagcgacaccaaaggtgtcccaagcaaagatgccgaggagacaattgtaggagaaatctatgaggatggcgtcgaccatggcgcagactctgggctccaacgccagctgagctctcgacatatcagtatgattggtcttgcttcgtccattggtatgggcctttggctaggatcaggaacatctttgaaaaatgccggtccggctggtattttcttgggatatatcctatctggcaccatcatttggagtgtcagtcagagtataggagaaatggcgatcatgtatccccttcctagtgctgtgagtttggtggcttctctcttgccgactgatcattactgacccggccccgctagttcgtgcaatggactaatatattcgtcgatgaatccgccggtttcgcgctcggttgggcttactggttctcttactggatcaccattgccaacgaggtacaaggagctatcacagtactcaacttctggacaagtgccgtccccactgccgctttgatcactatattctggttcgttattgtcctgatgaatgttggagcggtcaaatggttcgccgagatcgaagtcgtggctgccgcaatcaagttcggtttcatcttcgttgtaatcatctccggcattgttctttccgctggcggtgggcccaagggaggttatccggcgagaccgggaggcactattggcttccagttttggaacgagatggcgtttatcaatggtttcaaggggttcatctcggttatgccgacatgtatcttcgccttgtctggatcagaaaatgctggtctagtcgccgcagagaccagcaatccccttcgatctgtgcccaaggctgtcaagtcgatctgggtgagattgagcttgttctacatcctaggaagtttgatcgtcacgatcaacgtcagcccaaaggacgaaaatctgttcggtgcatctggcaccaattccagtcccttcgtcatcatgtataggaactctggagtggctccgctagctcatattatgaacgctgtcattctcgtctctgtcctctccactggtggtatctctggatacgctgggtcccgagtactcgttggtctcgcacaacttcgcatggcccccaaggttagtctggttcttttaccccgtccgagagtactgctgacaaaatgcgaattttccgtgtaggttctacagaagaccgatagctggggtcgtccatggtggggccttgcgcctactctcatcatcggaggtgggctggcctacctgaacgtcagcaacggtggtgctaccgtttttggctggttctccaacctgacctctctattcactctcttcggatggggcatgatctgcctgtcacatatccgtatgcgtgctgcctggaaagttcaaggccgctctgtcgaagaacttccttggaaatcaaaggtcttcccttgggctgcctattggggcctgttttggtgtgtagcacttatcatcatcgagttctatctggccgtgtcgcccttgggtgacaaacccagtgcggagaacttcttcgccaattacctctctgtggtggctattatcattctttatattggggcaaagattttctaccgcggtagaagatggaacaaactcgaagatatcaaccttgatgcttgtaggaggttctatgcaccacgggatgaggaggggaagaatgagaagagcttcgccaagaagtggctcaagtttccaaccaagaactgaccagcctatgggaggttatgtataaatccactccattgttgggtattttagtcagatttcaactttccaaatacatatgttgtatattttactgaactacttccgtttcatcctccacctaatttattttggggattgaaccaccaacccccctttttgttaattcgaccccgcctgcgccatatctcaggcataaactgaccgcctactagaactgttcaccgccttcctggccgctatgcctacgatttgtatgtttgcttgcttattgctgtttgtatgtttgctagatttctcagcgagaagttcgaagcttacaacgtttgcaaagggtcaaccatataagcaagccgcttcgttggtggttcaatccccaatatatattgcaagccctgttgggtaagtacgactagattgcagaatcgcctcaactgttgaatattaacaaatgttgcttcatgcacactttaaccaagaaaaacgagaattgatttcaccaataatctagttcaaatgcttaatttcgcccagctagggcaaaatccaatcagtaagaacgtattgccttactataacaagacgagttgatagcctggattatgaagaatgaagggtgaatgctacgagtactgagcgatatagggtgcacattctttattgcatcattaaagtcacaaccaaatttaaagcgttactagaccgagagccttggacggctgtgcctgtgaccccagcgagaatgccccagcttggcaacatcatttttctcgacaactgatctaatcctctgctccatccccctttgctctctcggatacatgatgaacctgacttgccctccttaattcccgatcaagtacctcagtcaaccgcccaagcagccactgaacctcactcgtttcggtaagcaaaggattctccttatcagtccaactccattcccgtgctgcttgcgcctgtccatcattggcttcatctccaagaaccttgggtttattatctccttcaatcaggctcatataatattcccattctagataatcgaatttccgggatggagtgttgctggcgtactcaataattttgcgtagctctcggaagagtaggtagatgtactggtggatgttttcggcttgtttttcttccttgttgtccttgaagtcgaaatcgttgccgttctctttattgggatcttgattttggctgaattgtgcgtgctgttgtgcaccttctttttcgccagtcgtttcttccatccaccatctgacccaggagatgtgagtcagtgtcttaagcctgtccacgaaggagtggtcacccggtagaatagtgagctcgccaatgaatagcgtaacgtcacgaataaatcggatgacggtatcgccaatattggagatgagaatagtaatcgtaggaacggcaagcagggaccaaaaaacgaagaaggatttacccaaactactgatcggatacaaatctccataaccaactgtcagaagacttgtatatgcaaagtatagagcctcaaagtacgaccattttgcgttcgactccgagcgccagaaaacgacacctccgatcagccatatcgtcatccaaagcaaaaaagaaagcaagagcgagagccatttgtgttggacgtttgccagcttacatacctgacgcatggctataaactctcgtttgcgctgctcccgctcgctgcggccttccgctttggcactcttcttcccgagcgaggggataatacccttagcaccagaacggtccgagaaggcttctcggagtaggtatttgcgcgtttgtgctgtcaacatgttgccaatcttttgcttgccattttccaacataagcgtacggatggaggagattataagaccaaggataatgattcctccgattgcatatgggaaaagcaaaccccggccgagatgcgtacttggcgagaaattacccacgccgatggtgagcaatgtatagtctgcaaaatatactgcgtctaggaagcgccatccctcgaccttagagtagacggctgcaccgcccagaagatagaagcagaaaatgatagtttgcagcatgagtgttcgttggctcgtagtcagattgaattttcggctagagtagccacggtaggcaccatatccagtcactgccattaatgacgcgatgatgaaatataaccctgctgcgaatgtgccatagtaataactctgcgagtagattcgaccgttgttctcgggcttgtacatgttcacgccgaagggaattaagattgcgatcaagaacgccgatgagatgtaccaccctacgacgatgattggctgggcgatttcgaaacggatgcgtcgggccatggtaagcgagagggctaggttggcgacaagtgcaaagacaagtgatattgcgttgatagcggtgaccctgcaaccgcatatgaggttaccgggagaatcattcagggtatgtctgatcatattaattaccattttggatccgggatatctgtcccaccgctgctggtgaggtccattcgccatggttgtgataaagaacagatattgaaagcgctagccatcggcccgaaagtgccctgaaaagaataatgagaatgtggacttccaaagtaaaggatgacatagtaggtttctgcatacagctactagagggtatgccgtacttgcgagccaccaacgcgcagcttgctggtactcggtatcatgttgcgacaacttattgatttcgtctatcttctgatttggagagctggcggtgcggtcgagagccactgcttcgtcggcaatggcgtcatcgaaaccaggttcgttcatttcgtgcgtgcttgatacaagggaacctcgtgtactctgccgtttgatcacgacctcgcagctggaatacggaggatgggaagcagctagaattccaggtagaaaagaattctaggtagaaaggagagacagtggggacagacatcatatgcataattgacttcattggcgcattcaaagaccaagcaaggcttgtcgcaagcctagtgacgggatgtccgctatgattggtcgacaatgcggaggggaccgaataaaaagcaagatctgtcgacgtcataccacgtggcttccatgttttggcaattaccacggaacttctattttccgcagatcaacgagaagcttggttagggatattaggatcaacctcacaaacatgagtgttcggtcgacaatgatgacaagcacttcatccggtccgcaccaagctataatatgccgtacacacagtgcaattattccaagtttcttataattagagatactttcaccctacaaattcagaatttgctttaaaagcccttgcagctcttcagccttcgcacgtagtcctccacttagccccgcttccatcaccatgccagtgccgacattccttccaaacatggactctataatgttatcgttggagctttgaatatgttctataatcttgtcagtcacgagtatgtggcaagaatacaagtcacataccgagatccttctcaatcgcatccaacgcatccagtaatatctgcacggcattgagaatccgcacgcacccgtcattcgttagaggtagatcacccagtcgcaggtcccaccgtagcccagctcgggatgatgttgacgatgtcgagtctggaagtatggtaaatagctgacgcaggtcgtggaacactatgtcatagatgttcaatagcgacatgtagcatgacaacatcattaagagggtgggtgtgtccacaaagtcatggctaccggggttgaaactgggaagcccggtccgcatccatttctgtcgggatacgatttctcgtagccattgcgcgagataggttgctccgccaatcgggtagtcgtagatgctgctactgctgtgctttctgtcgatgtttgctctgcggtaccgttgcaggtcgcttgtgtagtttgtcattgcgacagggatcaaagagaggccttggacttgggtggatggtattcggacttgggagttcgggttgtcgggcatggtgctgtccgtgtttggtatgttgagtatttctcttatgtgatttgtgtcggcttggttatagtatgtctggtctaacgagttgcttgattttgtaagatcgagctctgggctcggcgactcgggagagcaccaccattctgtctttcggacagggaatggcatacaaatgggcatgactatctggtctcccggggtgtggaataacatatccgccagaatcgggtccagcgatggatcggccaggttgtgcgggtcggcgatgggatcgacacgggagatcgatggcaaaggatcgtcctgcgatgcaagaaagccgggagacttcaatggtggcgtcgatgcgtttgattctgatgagtatgtggaaggaatctcttccgtcctgtcgagcttcttgggctgccgcccactgcgagcccgccgactgaaaacgcatggcacccgagcgcgcgagcaccgttggcacgtgttaagccattcaccgtcagacgatggcacgcaccgcagtttctgtaatcgacatcgatcgcacgatgtgcggtacgactgtgtgggtttggcggaggctgacatattgatcgtagggctggtaaggctaataaggctggtcaagctcacgataccaatgcttggctgttctgatcgtcgtcaagatgtgatagcagtgcgtgatctgacgacttggctaaaattggcattgattgaaatcttaagattttccgtgtcggtgggtcagatccggttcttgtatatatgtttggattcgaagtggaggacagcctggaacccaaaataagaacggaccatggcattcagctgtgtagcgctggacagaacgcccctgcatggcgctatgaatatcgattccatagccaatctatttacaagaatcgccaaggcgctgctgtgatccttctgagtggggctaatttggctgcaggcgggatcacacgtcaggtcgcttgcagtggtttggtccaagccgcgtctgcgggtctctctcgctgtgtatataggctgttgagcatgtcttgaacagttcagcatgtaagcgacaacgtttctgatgtatgaatgtcgcaaggggaagaatatcctccagctgtgcgctcgaacggaacaagaaaatggcagcgatatcgctccgataggtttgacacttatgcagacttctacttcggtgatatggatatcgggacgggtgccgtcggctctccgagagggttcagaagtcagcagataccgaatcactctgacgaagtgaatgcctttaacccgatcggtatccttctcgcgagatacctctggccacgtgggtttagccatctgggcgcatactattcgggccaataaggctggcaggtgaaacgcacgcccagggatcattgccgttgttatgccgtgcgccatagtggcatgagcgggtcagcggaagaaggcgcaacggcatcccctgcttggccccagcccttcatggttacttcgcgtcttgaataatttcttctttcatcttgttacgaggacaaaacaaccaatcgtattgccaacagattggcgtatcatagcattatctttaaatatcttgcacaatattcacagcgtgactgtcgtccgactccggagccattctccgtaacggtaaaacagaatcggcactggcgcaaatgccagcgccagaaaccctagcagcgtattaccccacccgtagttgagtgccgaatacatatgcgacccggcaagcggcaagaaggccccgaacattgagcgaaggagaatgttggcccctagcgcagatgccgccgcttctgacccgaatagatcgaccagatacagctgggagggcatgatcacgaagaaggctccaaacccaacgatgaacgttccaaatatcggagccatccaatgcacctggtgatatgccgtccagccgtaaatgaacaacccaggaccaatgactggcgggaaccacatcatcaggaccagccggtactcgggcttaggttcctgaacattgtctgctgccattttgctcttcaagatccggtcgcttagtatgccaaatgtaactagccccacgagttcgccaatacctaggccgaggtaggccagaccagaaatgccggcgctgaatccgtactgaccttcaaagaccatgctaaaggtggcaaaaaggagatatagaagtccgaatatgagagccacgtagatggacatgacaagcacgatcggcgaaaagatcaagagtttggtggggcgtacgagtgcagcgacaatgatctgctgctttgtaagaccgcgatcgagttttgatcggaggtgaaggttcccggttgtgcgtcgcaagtatgcggccttccgttccaatagggtgttaggatgtgtttcgcgcatgaagatgagcgttccgatacccgctgctcctccctgtcatagtgttagaatgctaaatactagatcagaacaagaccgcttacgaggatcgcgaccacccagaaggtccaccgccaatccttcccttcagcaacgaagcccccaatcaccggtcctagaacctaggtcagttagtatatttcgactacatagtagatgcaagttacataccggtcccagaagcgggcccagaccaaacaaggctgctgccgcaccgcgtttctcgatcgggatgacatcggcgatcgttccaccgcccagggaaagtggcgccgctcccgcgcagccagatagaaaccggaagaccagaaattgagcgggagtttgactcacggcgcaggcgacaacaaaaatgacgaagagagtattggaaatgtgatagacgacaaggcgcccgtacatctcagagagcgaggagatgacgaggggacccaatgcaaaccctagcagataaatactgacggcgaaggttgccaatgtcatattggtgatctccaggtccctggcgacgccctccattgccggagcgaccatggttgaggcgatgttgctagtaacttaattagcatggtcggttgtttttgtctcacccaggaaacgacttacacgaccatggacaagatggccacaatcacgacatgaccaaagcccttggtggcaggccagttgagggggtttttagggtcatctgggccgtcccagtcgaccacatcgtcctgcagtttatgcgacggcagcttggcagcctcctcgtctgccttcagctcgacatcaatccgagtccgctcggtctcatcattactagagaggttcatcctacagagtgtactcggtagtgggaccaaagggaatttgtcgtttaggacaagctttgcgcctatataataatagagaacgctcccaataattgcaaacggagatggatggaagattttctcggggattcaagtccatgggcgttggttacatgtcgtttcctccgtgttgtaaaggccgagctggcttgaagccaggaccagggctcggagattccatgactactcaaattgggtattctcagcgagaggcaaactattggatggtggtggaacgagtaacggagcggaggaatagacggagatagagagtcgtatatggaggaatccaagggaaggagagcaagacggaggaatgcacggcccttggaggcacatccatggatatgacaagttcgtccgattggtcagaatcctcgggagctgttgatcctccgcatattacccgcgccttacccgatatggttaggccatagcggacctcgggcgaatgtttacggcttccctttcgttccttgtcaatcaccatcggacaatccgagtacccctccatctgccatcattctcgtattgatgcatgctcacagctcctgatctttttatctattggctctgaatttcttccttagtctctatgtggcgatacaatcctctacggcgaaaacataccccacccattcccccacacgtgtgatggagaaccttgaccaggcgccgcctcgtttagtctaaacgacctgtgtgcagaggagtggtctggcccagcatatcacatatattcatacggtcgcatagctggaaaacgtgcacctgcatatccgcgacagccacaatggatcctccgcccgcagacgaacccaacccccaaccggcttccattaatcgtcggagcaaaccccagctctcttgtaatttatgtcgtcggaggaagtgagtgccaaacatctccgactttccgaatcaaatctgacagaattctccgataggctccgatgcgaccgcaaccagccttgtttgacatgcaccgctcgtggattggcactatcgtgtgcctatcccaataatcaagctccacaatcgcctagaccacatggggcccacagggctcgcccccaagcaaccgtccaggaccgtttgggtcagctagagcagattgtcgtttcgctgatgcagaagaccaccgatggccaagatcgaccggaccagcatccagtcgcatcagctccacaagatggcccccaagaagactcgccgggactggccattaatactgcagactctccagctcagtccgatggcggaagtgtatggtttagctcttcggacgcccagtatgtcggaggaacccactgggccgccatcctggatgggatcgccgacatcaaggagcagcttgaacaagaagattatgggaacaccgagaagcctgccatgctgcatacctttctgctgtatggatgtaaatcagcgagtaaagaagatatcttggcagccctgcccgatagacccgctgttgatcgctacatttcccagtactttaatcgattggacttggcgccatgtaagcccctgccatccgatatgcgaacaatgactaatacaggcattatactattcagcctgtctacacagtggtcagttttcacgcgaggtatgcgaaagagtttgccaaatagcgtgagtagaatgtggttctaacgacaataatgtagtatgaacggttctgggagaatcaagctcagacctcgatcatgtggctgggtctccttttctctatgatatgtctcgcagtgctggcttcaagtgcggcagactccagctcatccccaggagtccgcaatccgttggtggatacgtaccgcgaaaagatagtacaatgtctcattttgggcgagtacacaaaatctgggcgttacatatttgaaaccttatatcactacctgactatcgagtattccatccgaaaggatgccgaccgggacatctggatcctctcgggaatctcggtcaatatagctctgcgcatgggttaccaccgggatccatcgcacttgccaggaatctctccattcacaggagagatgcgacggcgggcctgggccactatcgtgcagggagatatcctgatatccacccagatgggcatgccacgcatgatcaaggactggcaatgtgataccgtagagccccgtaatctgaatgactcggacttccatgaggattgcaccgagcttcccccgtccaggccagagacggaaatcactacggtttcgcacctggtcgctcggtggcgtatctttgccgccttgggttcgattgtggatttcaccgcgtcggtgcggccggtggcctacgatgaggtgatgcgactagatcgcattctgcgtgacgcggaggcgacagtccctgcctacctccgtatgaagggcatggccgcggcggtgaccgatcccccgcaagtgattatgcatcggctcttcctcagactgatgttccacaagggtcagatcatgctacactgcaagtatttaaccccagacccatccgcatcttccaatgacccagtatcatactcctactcgcgtacctcttgcatagaggcagccttgggtattttggagattcagcgaatactcgacgaggaaaccaaccctgatggtcagctttatatgatgcgatggcgggcttcctccttcataaagcatgagtttctgacagccacgatgctactgtgctttctcgcgcgacagagcaatggtagcccgaatgctttgaccgatggccacgacttaaaccaaatcatggcagcgctaacaagcgcacatggtatctggatacggtcaaggaattcatcggtggaagcaaagacagcagcagacactctcagcattgtcctgggcatacactcgggtgattccaatatgggcgctgagggccaggctatgaacaataatttctccctgaattcaggtcagtcggccgtctttgtttctctagccagtccttgcttacgatagctcagccctaccgatacccttccccgctggaggtttcaatggaaacggtctggaagagaacctttattatgggttccctttcatggggtccaatcagatgttcccaggctcaaccctcatgatggatccgaatctcgcatggcaatggtaaaaggtgtgttacgactacaatgctccccgccacatctcactgacaagaacatagtattttgaaacggattacggcaggatagagtttggagttcggcgtgttgttgtattcggaatttttcggtggaatatcaccttagtgctgatctgtccaagcctcgatgagacgatcagtataccacgaagacaatgaaacctgcgtatataatgaacaaacttcctcgatgtcaatcaaatacgtcaacaatcatcttgtattctcagagctcctccctttcttcaacacggattaattgaaagacctgccccctatgcctgaaccaattgccatcatcggaaccgcctgtcgctttcccggcgggtgcgatagccccagcaaactctgggggctattgagaaaccctcacgacattgccaaaaaggttcctctggagcgcttcaatgttgataatttctaccaccccgaggcaactcaccatggcaccacgaacgctaccaagtcctactttcttgaggagaacatcgctcagttcgatgcgccgttcttcaatatacaaccgatggagagcgatgctgttgatccgcagcaacgtctactcctagagactgtgtatgactccctgtgcaccgcgggtctgcccatggagaacctccgcggctcgtctacggctgtctacgttggtatgatgtgcgatgattggtccaccatggtggcgagcgatgtcgagaccttgccaacctatacggctaccggcttagctcgaagtattgtgtccaaccggatctcgtatgtctttgactggcatggcccttcgataaccatcgatacggcatgctcgtcgagtcttgttgccgtgcaccacgccgtgcagaccttgcgtagtggtgaatcttccttggccatagccgctggaaccaacttgattctaagtcctagtgagtacagactcccgaattgaccgagttgccactgatctctcaagccatgtacgtaaccgagacgaacctgcgaatgttgtcgccgaatggacggtgcgcgatgtgggatcgggctgccgatggctatgctcgtggcgagggagtcgccgctgtagtcttaaagacattgagccgagctctggccgatggagaccacatagagtgcatcattcgtgagactggagtgaatcaggatggtcgcactaccggactcaccatgccgagtaacaccgcgcaaacggcgttaatccgcgacacgtaccgccgagcggggctggacatcaatgaacctcacgatcgccctcaattcttccatgcccacggaactggcacccaggccggtgaccctcaagaagcggaggctgtctcggcagctctatttcccaatgactcgaaggaccacacagagctctttgtggggtcaatcaagactgtgattgggcacactgaaggctctgctggtctggcctctttgattgggtcctcactggctatgaagcatggaatcgtaccgcctaatcttcactttagcgaattgagcgacaaagtcgcgccgttttatacgaatctgaagatcccaacagagcccatgccttggccgaagctggctcccggtcaagtcaaacgggccagtatcaatagttttggtgaggcgatttctctcgatatcatgttacttgctaactcttgtaggttttggtggaaccaatgcccacgccatcatcgagagtctcgagcaagattccgaaagaacattgaagcttcgttcggtcgcaaatatcactccactggttttttctgcagcttccgaaaagagccttcggaatatgctcgctacgtattcagtctacctgtccgccaaccctacattagatctccatgatctggccagtacgctcagcatgcgtcgatcgacactaccctttcgaacttacgttccagtccgtagcaaggaagggctacccaagcagttgaagaccatggcggatgccgccccaaatgagtcggagctcagcgttcgccgctctcagatcaataacccagctattcttggcgtgttcaccgggcagggagcgcagtggccacggatgggagcgtgtctcatcgagacctcaattttcgcccaacagaaaattgcctggctcgactcaattcttcaaaccttacctgcagaggaccgcccgacctggacgatcaaggagcagctgcttgctggtagcgagacttcccgggtgacggaagcggcagtatcgcagcccctgtgccttgctattcaggtggtattggttgatatcctccacgctgcgggcgttacattcaaagctgtcgtgggccactcatccggtgagatcggagctgcgtacgctgcgggtctcctgtcggccgaggatgccgttaggatcgcatactaccgtggcctgcacgcaaaacatgcatcatcaccgaacggcgagaagggtgccatgatggctgttggcgcttcgcatgtagaagccctggacatgtgcgccgactcacgcttcaaaggccgcattcaggtcgcggcagtgaattctagctccagtattacaatttcaggtgacgaaggcactattgatgagctccttgaggtactcaaagccgagcagaggtttgcgaggaagctgaaggttgacaccgcctatcactcggcgcacatgctaccctgtgcagagccttacttggagtccatgaagtcgtgcggaatacagccagaagaccggacagggcctgtatggctttctagtgttaccgagggacagaaaatggccaaggaaattctcactgaaagctactgggttgataacatgtgcaacacggtattattctctggcgcagtggctcaggctgttttggaggctgggccattcgacatgaccattgaaatcggtccgcacccggcactcaagggtccggtaacatcgacgcttgaggagtttggatgtgaagccccctacacaggtctgctatcccgagccaaaaacgatgttcacgaactatccgcaaacctcggtttcatctggatgcatcttgggtccggcagcattcagtttgacactgtcgacaagcttctatctgggttcaaaggaaacagggaagtcctcaccaacttgccgtcatatcccttcgaccatcagcgtgaatactggactgggtcccgcgtgtctaatcaccacaaatttcgtcgagcccctccaaacccactgctcgggacgcaatgttccgaagcgaacactgcccatgagattcaatggagaaatatccttcgcccgagcgagatctcttggctcagtgggcatcgtctgcagggtcaagtggttttcccagccacgggttacgtctccatggccattgaagcgacgaagcagctcactattcagaatcatattacttgcatcaagatttacgatctggaaataggtcgcgcaattgctttcggcgatgatgcagccagtatcgaggtcgtctttaatgcaagcgtggtcgagataaccgagaaagccatcaccgcccagttcgcttgttactcaatttccaatgccgatggaaatgcagtcctgaatgcgaaaggcaaggtcattgcagatttgggtagctctagtccagggacacttgcaagttacgagtccaaccctttcaatctggtcaatgttgaccaaactgagttttaccggtacctcactaagattggctatgattactccgagcccttccaaggcgtgtcgcagattcaccgcaagcctggatatgctatcggtctgatcgaggaccagtctggcctctcatgggaggataatctcacatttcatccgggagtccttgatactgctctacaaaccgctttcgcggcatggtcctttcctggtgatggtcagatatggtcccttcatgttcccactcggtttgagtcgctagttttcaaccctcacttctcccctcttgccctaggcaaagaacgctccttcaaatacgaaacattcattcgcactaatacccaaggaagcctgactgccgatattcacttgtacaccgcagatggcaagaactcatgcatccagattgaaggtgcatcccttgttccattctcaccgggctctcctaaagacgatctgccactcttttcaagtttcaagatgagacctgctgttcctgatgggcaacttgcggcaatgggcgagacgatttcaccctacgaagcgcaggtttacaaggacattgatcgtgtcgctttctggtatatccgaaatgtggcccagactattaccccagaagagtgtgatcagattctgccccatttcagatactatctgcggtggtgtgagcgcatgattggcatggtctctcggggtgaacatcccaaggtccccgttgaatgtcttaatgatgagagaaaagacatcactgaagtgttgagcaagtaagttcatgacttttatttcaccccaattcttcttctgcgcaatctcgaatagattattgattgtcttgcattaggtatgagggccgcaaagatatccgatttgttgaggtggtcggcgaccaccttgttgaagtcgtccgcagtggcactagcatgctagagtatatgaaccaggatgggctgatgctcgcggtttacgaaaatggtctggcagccgggccaaacaaccgctggctgagtcgcatcgtcgcccaaattgcgcatcgctatccgggaatgcatattttcgagatcggtcagtcttgatgcttcatattacattagctttcagcgcacaagctgactttctgtaggagccggaacgggcgcatccaccaagacaattttgcccgaagtcggctcagcctttggaacgtatactttcactgacgtgtctagtggtttcttccctgaagctgaggagcgcttcaaggactatgccaaccgtatgatcttcaagacgttcaacactgagttcccgccaagcgatcagggattcactgaaggccagtacgatgtggttattgctgcaaatgttcttcatgtctcggccgacatggagcgatccatgacaaatgtccgccgactattgaaacccggtggttacttgattaccttagaggtgacaaattgtgaccttctcttcagcggtatgactgtgggaactctcccaggttggtgggtggctgcggagactggacgaccgtggggtccttgcttgacgttgcctcagtgggactctgtactccggcaaacaggcttctcgggcattgatactatgacacccgatctcagtgtatctcttcccgtcgcggtctttgtttcccaggccattgatgatcgagttgctctccttcgagaccctctttcattgtcgaccgaggataatttgggcactctggtcatcatcggcggcacgacgctaccagtcttcggtattgtggaagatgttgtgactaatctatcctctatatttgctgaggtcatgctgtttgagactgttgaagagttggcaatctttggctccgcggtacctaatggggccagcattctctgtctaactgatctcgatgaaccatttatgaagacattgacgccgcagaagtttaccagcttacagaaaatgttcgacgtggctggaaccttggtgttggtttctcgtggctgcagagcagatgaaccatattccatgatgcttgtgggcatcgggcggacagtcaagaccgaaaatccgaaaatcaaccttcaactacttgacattgaagccgttgaggacacaacggccaacatgctgtctgaagctctgcttagacaccatcttctgaggcaatggcagtctaggaaagaaccccttctctggtcctcagagccggaggttgttatgcaagaccgacgcgcactcattccgaggctcttgcccagcacagacaagaatcagcgttacaactcccagagacgcgctataaccaaggaggtcgaccctagacaggcaaccatacagatgatccagaatggagtcacattcgacgtcaatgatgtttcgccactgctaatttccgatgcaccatcgtcgaaatccattacagttcgcagcattctttcctcattccagtctctcaaaattggaagcgctggtttcctccgtctcatctacggtgtgacttcttcgtctgagacagttgtcgccctttcatgctccactcagtccccagcagttgtaccatccaagtggtgtgtaccaattgcaggccatgctatgggtcatagcccatcatcactccttacaactttggctgccaatatcatggcgaaggaggttctgagctctgtgccggatggtggagttcttctgatacgggaggcagatgagcctttcaagtcttatcttttgcacatggcaaaagaattgagtgtcagaacggtttttgttaccagtcagggcaacacgggtacccctgacagcttctatatccaccccagactttcgcagcataaattgaagcagctccttcctgcagatgttgccgtctacgctgatctatcccagggggctggagcagatgatttatcagaactacttgataagtgtctcccatctcaatgcgtccatatcaaacgagctctcttctcaataatgatatcactgatcctcatccccgtttttgtgacatgatcagtcaacttcttcagcaaacaattgaaacttccacgcattctgcaagaactatcaccattccgcttagcagagtgtccgatcattctgtgtttgagccttttaccgtggttgactggtcaattcaatccgttccggtcaaagttcagccaatcgattctggcatcatcttcaggccggatcgaacatacttcttcgttggtctagctgccgagctgggtcagtccttgtgccaatggatgatttctcatggagccaagtattttgtcttgagtagtcggtctccaaaggtcagcccgaattttattgaggggatggcgcagcagggagcgacagtcagaacattgccgttgtcagtaaatttgctccaacttttacctcaccgactaacaaaacccagagatattacaagccgaaggtccctttggtcctgctaccgagagatcagccgcaccatgcccgccgttggcggcgtcatcaacggtgccatgatcctccaagacagcgttttcgaaaacatgacccatgaacaattcctcaaagtgatcagaccaaaggtccaaggcaccatactcttggatgaactattctatgactcacccctagaattcttcatcgtcacttcctccatcaccgcagccatcggtttcagcggacagggtaactactcggcggcgaacacgttcatgacctctctcatgtaccagcgcaagaagaggggggttcctggctcctctatggacatcccggctgttcacggtattggatatgccgcccaagaggataactttgactttgagtatttcactacactcggctacaacaatgtctctgagcaagacttctgcacactttttgcagaggctattctctccggtcgcgccgactcccttgatgaggctgaggttgtatcaggtgttaattatgtgtcgcccgacttggatatcccccagactcacaccagagatatcaaattctcccattacatcctgaccgcggaagaaggatccagcgtcagcggtagcaagtccgccgcacaggtgagggtacagttgcagggagtgacaagcgaagaggcaatctatgatattgtcaaaggtaagtcactgattattgaacactaccgacagcttgactgatttcataacagattccttcctggtgaatctcaaaaaagttctccagatctcagctgatgatgatattgatctttcaacgcctcttgtggagcaggggctggactcacttgtggctgtaatggttcgctcgtggtttttgaaagagatcgaggtcgatattccggttctgaagatccttgacggcagctctatttctgatcttcttcaactggccgtttccaagatacctacatctatcacttgtgcagaggacccgaaaagctacactgacactccaagcccatcgttaccaccacctgccaaaaccgtcttcaatagtaccatttctggaacacctagcgactctacacccagctactcaccactgctgacacctagtgaaagcgagacatcatccattgagctgctgactccagatgagccccttaaatccaaggaactaggggccacagataaactggcccgatcgcaacgggacttggtcattcagcattcccgcctcacgagagagcccatgtcctttgggcaagccagattctggttcctccatcatttcttgaagagcaaaacgtccttcaacttttcgacttctgcacgtctggtgggcccgctgcgagtgacggcctttgagcgagctttggacacagtgattcagcgacacgaaggtctacgtactagattcctctggttggatggggatattggcacacctatgcaggagattatctctcaccctctgcttaaattggagaccaagcgcatatactccgatgctgaggcagccgacgaactagagaggttgcaaaatcacgaatatgatctggaagactgggggtctatcagagcaatgcttcttattttgtccgacaccgtccactacttcctccttggatgtcatcatattgccttggatggacaaagtatgcacattcttttctcggagctcgacggtttgtataacggtaaagctgttcctcgaatccccgatgcctcgcaataccgaaagtttgctaccagacagaaacaagattacgaatctgggctattgcaggctgacatcgatttcttccgtgacatcgtccgtgaggatccgggtgcgattgagccgttctcgttctcgcacctctcaaagcggaagattctagatacctaccggtgagttgacaatgaaatcgggttgattattttctgacattgttctaggcaccatcgcgcgtcgacccggctgggagccgggttagctcgcaaggtcaagcaaattgcccgcaagcttcagagcacgaattttcatttctacctgactattcttcaagcgctcgtattccgcctacttccctataccaaccaattctttgtcggaattgcggacgcgaaccgagtggataaagattcgatcaacacgatcggttgcctcgtgaatctactgccgctcaagttcaaccgggcggactcatccaaactcgatcatgccgtcaaactcacacggagcaaggtgtactctgctctccagcactcgcgagtgtcattcgatgttcttgtcaatgagctcgagatcaaccgttccgccatgcacaccccaatcttccaaatcttcatggactaccggctaggcgaccacgagaactcgcggctagtcggttgcgatgccgagctttcgtggaataatgctgctacagggtatgatttgcacctggaggtgcttgatactgtcgatgaagagtcgctcgttgttttgaaagcgcaagagggtctctattccaaggaagcagcggacttgctgcttcgtgctttcaccaatctcctagaacaggccacacaaagtcctgccgatcgtgtcgatctatcgtcgcctctgctgtggtctagaaaggatattgatgatgcgttagcgttgggaaagggtatgtcacacttcgaaatcagggagattacgactaatcctcctctataggtccggaactgaaccctgaatggccatcgacggtcgcacaccgcgttgatgagatggtggatgcacaccctgatgtcatagctatcaaggatggacatggacatgtcctcacctatagtgccatggccgaccgcgttaacacgatcgctgctaccctccttgaatatgtctctggtggcgatagtgttgccgtgttccaagagccaagcgctgactggatctgttcgctactcgccatcttccgtgttggggcggcgtatgtccccttggatctgaagaatggtctgcaacggcttgcgggtgctgttgaagttgccagcccgcgggttatcctccacgataaattcacagaggctcgagtgccggatcttcgggtggcaagggcagctatcgtcaatgtctccgatattgacatgaaccccgatgccaaagtaccgaacggggccatggcagagtccactgcggctattctgttcactagtgggtcgacgggtgttcccaagggcatcgtactaccgcattcttgcttcgcgacgcatgtcgaagctgtcgaaaaagcctggggcgtgggcgcggcggtagtcctccaacaaattgccctcagttttgacttttccttgcatcagatcttcacggcccttgccaacgggggaaccctctttgtggtcccgtacgagaaacgcggagacccgtatgaaatcaccaagatcatgaagcaagaaggagtcacccacaccctggccaccccaaccgaatatggtatgtggttcgatgcaggggcggacattctctcccagtgctcttcctggaaatgggctcttgtcggtggcgaagccttgccaaagtcaattgttcgacgcttccgggatttgaactcgagtaatctcaagctcttcgatttctatggacctgtagaggccactattgcacttaccaaaggcgaggtcaatttcgggctcgctgatactgaacaaccaattccggttggaaggcttcttcccaactactctgtctacattctagacgaagcgctgcagcctctcccgatcggtgtcccgggggagattgttgttggcggacccggagtggcggcaggttaccttggccaagaagggctcacaaacgagaagtttatccccgtccctagctacttgcaggacgaacgctccaagaagcttggatggaacagattatatcggaccggtgaccgtggacgcctgaacaacgacggcactctcatatatgagggtcggatcaacggtgacgatcagatcaagcttcgtggcattcgcattgagctgggggagatcgaaaatgctattatcgaggtcgcgaacggcaaagtctctcaggcggttgttgctgtccatggcgaagaggctgacaaatttttggtggcttatgttgtcctttcatcgcatggtgaaaagtccagtgacaatcttttcacagccatcaaagcagcactcccccttcccagctatatgcgaccttcgctattcattcccattgacagtgtcccgatgaacgtgcatggaaagactgatcgcaaggctctttacaatattcctttgccggatatcgtgacttcgggtccctctgagcgaggtctgatgaatttccaagaaaagaaactctgtggattatgggaagagatcttgccagcatatggtgccgtaatcagctcagggacagacttcttccatgttggaggaaactcgctgttgcttgtcaaacttcaacgccgcctcaaggaagcctttgcgttttctccacgactcgctgatctcatgaactctagtacattgagcgatatggcccgccttctagaggacacggatgcgagtgtggtcgattgggaggctgaaacatctgtgccggcatcatgggctgatctcgcacagagtgccacgccgtctgccccaaatgacagaatgacggtccttttgacgggcgcaactggttatatcggccgtcatctcctctcctctcttcttgaaagcacccgtgtgtccagaatcatctgccttgtccgtgacaaaagcaagctagtcacagaatctgagaaagtcgtggcaatctcctgcgctttcgacaagcccaatcttgggctcacctccgatgagcttagctatctgactcacaatgccgacatcgtggtgcattgtgctgccaatcgatccttctgggatgactaccaggcactgagagccgtgaacttctattccgtccgtgacatcgcccgtctgtgtcttccgcgccgcttgccgcttcacttcttttcttccggcgctgtcgccgaccaagcggatctcgcggattcacacgatggctatttgacaagcaaatgggcagccgaaaaattccttcacaatgtatctcaggagtttgaattgccggtgcatatccacagtccaagcgcagcaactgcagacacgccgtacacagtcgactccatcgtccaacaggactttatcgaatgtgcacagcgtgtccgtgcacggcccgatctcgagggtacgtccggccatatggatctcattcagacgaccggtttcatcgcgacagcatcggaggccattcttaacgggcgtgaagacatcgatatcaatgctcccatactcaggagggtggtatataaccccacccaacggttcgatatccagcgctccacttcttctatcggtgctgatcccagatgggcgtcactgccgacgatggatatgctgcagtggatggggaaggcaaagcagaatgggttcccgtatgtgctgacggcccagcatattgtgatcggttcgaagacgggacaggtggtatctaggcgataggtcttgcagacatgacgctgaaattgtgtatacattagatgcatttattttcttcttctatgattctttttcccacacaatccagtacatacgaccatagggtgtggaaaacagggcttcccgtccgctcagccgtacttaagcnnnnnnnnnnnnnnnnnnnnnnnnnnnnnnnnnnnnnnnnnnnnnnnnnnnnnnnnnnnnnnnnnnnnnnnnnnnnnnnnnnnnnnnnnnnnnnnnnnnnnnnnnnnnnnnnnnnnnnnnnnnnnnnnnnnnnnnnnnnnnnnnnnnnnnnnnnnnnnnnnnnnnnnnnnnnnnnnnnnnnnnnnnnnnnnnnnnnnnnnnnnnnnnnnnnnnnnnnnnnnnnnnnnnnnnnnnnnnnnnnnnnnnnnnnnnnnnnnnnnnnnnnnnnnnnnnnnnnnnnnnnnnnnnnnnnnnnnnnnnnnnnnnnnnnnnnnnnnnnnnnnnnnnnnnnnnnnnnnnnnnnnncgccggtgagttagtagttgggtgggtgaccaccagcgaatcctcactgttgtatgtttttgtttttattatttgttgagtacggagtatagcaatagcatgttcatcttaggccctgtggtggacctctatgaatgactttttttggaaatgaagcttaacgagacctgagagcagaaggtaggtgggctcaagggtggaggaaaagtagaaactgacatgagagcacttgatatatctatctgacgctatgaccatcaaggggggcagaggtcacctgacccaatagtgataagccttcttaccatcccatctacggctatagtctatagttctcagttattatatattcccctccagtgctataccaaatacatacgaccatagggtgtggaaaatagggcttcccgtccgctcagccgtactcaagccacacgccggtgagttagtagttgggtgggtgaccaccagcgaatcctcactgttgtatgtttttttatttattggcaaaggttacatacatacaaatagaaaggtgcccaggtgatctgcacacaacaatcaaacaatccttttcccgtcgtctacctggaaaactcgagaactggggagaaaagacatccgaaaagacatccaaaaagacttactactagacagtaccaagatgacagacaaggccgcataagcggcctatcattcttgtttggtactgggtcaagattatattcagttcgtgaggcgtctctctatcgcttattttcttttatcctcactgccaaaaaaaacacaagaagaagccaactcaaaaccatccctgcatatggagcgtacatcttcagctattaggcgtaaaagacacagatagattgtctgtatagatggttacgtatgttaaatctgtactaatatatcccgttttcatttagtttgtgaaagtcgatttctacgtttatagtacgcaagatagctgcttaagtattagtcttgagcaggcgagggtataatcggcacctccatgagaggtcaactataatatgcggaaatcttgagattgggtgctatgtttctgttgctgatggatgtttgtctttattagagtatagagaacgcagttgcctcccgtcatagagattatcaacacaaaccatatatcaagtcatcaattatcggcagactccaaaatgctcgccgccttgtctatctcatcaatatcattgacaaactgcagggctattgggagacctgatttttgagcaatgtccctaagacgcttcatgacccattttcgggtgcggcctcttgtgactggggattttccaaccgtgtataagcaccacattagcagatgcccacccgaagcacttccgttggcagatggatcggaagacaaatcggcagaagtaggagactccgctggggacaacacagctcccaaggactgcggaactgtggccaaaatatcgtcacccagagttttgaggattcgacatgtcttttcaagggttgtcgctatttccttttggcgggccggtgggagacccgcagtgagggctttcgacaaaaggtggaattcaatctcgcagataatgacttgaaggatacgagaattgttccaaagtcttatagcccacgcggatctgtagaggtcatatcgagaattgtaaatgaggtctgggtctccactgtgatcttcaatcgttgcatacggttcttgcgtcctaaaattaccaagaacgtcttgaaagtcacgttgaaggatagcagattcttccaggaagtatgctaaagttgcaccatctttgattttggtcaccgtaacatccgacagaagattgacagtccgcgtggccagcacgcctagtagccaaaggcaactggagttgtcggcctgcttgcttgcctcttcttgcaactcaagcatatctcgtggaaatggctcaaggcgatgaacacaggcagcgcacatatctgcacgcacttgattgaacatgggaatagaggctggacttgagaattggctcttgccacgtgaaaccaccagcgccacggtcccttttatatattggaaccatgtttcaaaattgctcacatgctcgaacaagccaagagagatgactgacattaacgtactatccttgatagattcggcaggagaactgagcgctgcgttcactttgtcaatcgcttcccagtattttgtgcgggcccgctgggacaattcaggctgttgagtggagtttgccagggctgcaagacccacagctgccatgctggcaatcaaggtcggattctcaccatcagcgctaaacactgccggcacatagtccagataccctcgagagggagaaagaccaccaacgacgaaatgaaatagaaaatagttgacgcccacctcgtccgagctgagactcagagtgcgggatgggggcgatcttttcaatgtttccaagccatctgcctttgcccgagcgtctttggagcgcttaattgtgtgggtggtttgatcgcggaagaccagctcccattcatctctatacccttgacattcctcgtgcgcacgaatgcactgtccacaatggggaaacttctggtcgcactttacaaaaatactcagtactcagcattgagcgagtcctatccgacagtagattgatcccaggcacttacccttcgcttgatagatcggcagttgccgcaatttttggaacgtcgtccactcgctggcataattatgattcagaagagaagggagtacgcataagatgaaaaatgagcacttggcaagttctcttggcggttggaaagaagaaacaagctatgacattgttgactctttttaaggtacaaactacgcggctaccccgctgggctgagagctgaaggctcagactcagccgtgcgctaccccttttgcgccaagatctgcaaatcatacagctaagctaacacatgagaagtgtccaattcccccccctatttctccgaggtcgagaatttgtcgtttattcatgcggaaagagatgatgaatgtagcatttaataaccagcgaaactgcgtggtgttcaactcttgaaaacaagagaatagaagagatggagagtccaaatacacggtcagatacagtactaaaccgtttgatacagggtaatttaccccgaatctgatcagcggggaaatatcggggaatggaccgcagaattacttctcttagccactttatgtgaactatgttaccgaaatattagtgatacttcgacgattgacttagtttcgcttcttacaacacaatggccttttcagtcttaacaaattcagtatcattatggaagcgaacttcctcctatacacaacgtgacggctttctttttctcttcgttcttcaatttcatcctcaaagccactcttcacgcccaaaagacccatccttcaaacagaaaaacgaaactcacacgcccattggtttcggctcgatatcttgctgggggactggagtaagcttcacgaagtcgctttccagaatggctgatattcccaaggccatggtcattcccatggcaatgatttcctccaatacatccatgcacagatagaccgtggtatttccatccagtgcaaaggcactaagcgttgtgtaatcgctgagcgccgagtagacgaggcgaaccgccaacaagggagtagaaagtgcaatggccaggaacaacttcttttggaatctccgcatagagaagctcagttcatagaaaagccaaagactgaggagaacaaagatgacgaatacagccaggaaaattcccatggctacttttgcgagcttgccagggtggtaagttccgtcgttgccgttggaggagctgactccagcgataccgagaatgagagcgatgatggtgaccagagtcagcaatgccatgggcctcggaggcattcttctatccacatcactataaagacacacgttagtctctgatcggcgcgatgaatactttcgcagtgaaaaactcacatttgtctcagcagtccgataaaagttagtaagagaggtgcaataccaatcatttggcacactgccaccgcgactttgatgttgtaggaatcattgctgattgccagcagcgaggatatacttccagcgatccggatgagagaaagggtgacggcataccgccaaatcttgctcccttgcctccaacctgtcctcttccagatgaagatggcagcaacgagaatgatgggaaacacgatcagctggaggatagcgatgccgtttcgatagctaacagcagccatgttgctttaaattaatggtaggacaaagaaaaggacgtcgtcgaggtaatttgaagtgtggtcaggaatgcaaacccgtttcttgagtggtttttgtaacacagatatctggtatcctttatacttcgaattgtccttcaatttgatgttgattcagcccggcgatcttactgccagcgtcaccgatcgtgattaaacgttccttattgactggtctaacatctatattacccgaataggaagattcttgctgatctcagcgtgtcagtggcttgggtcctaagcctcgccaagattggggccgaaatgatctgattatatcttagctatatctcctccagggccgatccctctcgagccaaagcgtaatatactacagtagcggtgattttttttacactgccccgcagcatcgaagatgcccaattcgggggagcgcccgaaagcttgttctgcttgtgcgcccggtatatcttataacacagtcaatcatattgcgggccgctgtgacaataagagaaagggccatttttgttgtcgattgacaatgtattgattatcaatatttcatccagcagtgacgtgtaaggcgctattgatgcagcctttgactgcagcatggaagaagcgggctgaatgaaatgcaaacgaaatttgcaaagatacagcagcctccatcggaaatgccgtgagaggctgagagaaaattatttgttattgctccgtgcggggtaccgatgaattgatcaccatgatctacacgtttacttgtccgagtatcgtgaggttgaacaaagaacttgggattcccgatccatagcgctagtccactttggggaatcgagatgcagcaccaatcacagcgctctcgaccccgttcgtgttgcaaagccaattgaccaaagaaagagtactagtctaatcaggcctacaacgggtgatagataggaatgaatggaacgttaattttctaaccgagtaacagtctaaagtgaatatacggtcagatacaatcctaaaccatcggatacaggtcgtccgcggttggttttgctctcacgggccctataccctagtagcaactctagggcacctacactatagttggcgcactatggtttctcggtccctgattggtttgactcgagatattgacagatatcaagctcgtggtggctctgcgccccaaggggccacacgtggtagatccatcgatcagatcagccaagtcacaccgtgatgtaagagcattggcccggatccatcgaattctctttctacttcttcatcaccaccacagcccatcggtgcagttgtcgagatggaccttttcatctaaaaccttgggctagtctacgacttgatttcgacacaaggtagaacatttctatgcagagcattttaaagcgtgtcctggtcaccttgacatttcatccttctacgcctaagtcctttagcccaactccaataaaggatctcagttaagtcctctttcctcttgcacagctttatcttgtctcaatcatcgtatatattattcttctcatatgaagctccactaccagaatcccctgaataagttactaattctacacgagctcggattttctccactgtccctgcgggaagccaatagaccctctacgggctctcaagaagcttcagcttactgcggctaaaactggatgagagactggtaatcaaaacaagctcaatatattaaccgtgagatgccagatctgagctactcgtagcagtagtaggcactacgcacgtttcaatgtcagccttcgattcgccgataaaatgcaaaaagaaacttactccgagggacacttccagccaacacatttccagcagtcaaagaagtgggtaggatcgtacttcttctttatccgaagcaactcgggataattcgatccgaaaaaggtctcttgccatttcggctccaagtaatggccttcattcaaatagcaccctccaccaggcgtcaaacgtttcagtggctcgacagtatccaaccatgcctcgagcagatttgtctcgttttggaccccaagttcactcgtccatccacctgtcatgagagtatgccagagagctgggcgccaggcaggattgacacttgtcgtgttgccattttggtgatttacaggcgtggtcatgatgatttgggtgagggaatcacctgcggggagcagcttattgctgagccgaactccttgaaggacggcatcgactaggtctgcgactttgcgtttgctctcaaataatgagcgcgggatcagtcgacctgcaacagcttcaaagattccgcccggtgtgtattcggcagcgatcccatcggtaatctgtaagaattcggtatatttgggatatgtcgtgtaattgctcttggtgacctggatatttgtttgattcgccaaaaaggaggaaaatcccctggtcagagttttcaaagccgtttcgttgttcgaaggcaggacaagataaatttcagctttggttggccagtagtaagcatgtcctgagatgttgttatgagaccaggtaggttgataggttgcgtgttgcgtgagaacctgtttcaatgcagcgtaattggcagtttcattcccgtgtgtcgtgaagctgccctcgaattgatacacgttgatcttgaccgctggatggagttgaaagcgatagcttgtcaaaatgccgaaggagcctccgcctccgcctcgcatggcccagaagagctcgggatcattgcatttattgattactcgcaatttgccgtctgcagttacgacctcgaattcaaccgcattatccaccatcagaccatacttgggaccaaagacgccgtggccacctccttgaccaaagccgccagccaggccaaccgacccttcattgccaccggtaacatccatgttgaactttgtgaaataggtgtagacgtccgtcgcctgagcaccggatcctatctctgcgatatgttgaccgttcgaggcaggacaattggatgcagtaaagtttttgtgatacttcatattgttcatattgtgagtccagattgcaagagtgtcgggactagtagagcgtccaaagtagtcatgtcctgtgttcttgatcgtgatccgaagatgatgttttcgggcgaatttcacagcggtaacaacatggcttggtttcctagcatcgacatacaatgatgatagtcggccaaggtagcaattgtcggaaatgacctcagccggattcaaagcattcagggcacatgtttgagactggcatccttcccagttgagtcctgttgctgcgccgtatacgtcggttcgtgcttggtttgttgaatagttcgatttgacgatatcacaggctgaagggtcatagtattgagaaataatagcagcttgcggcaaagggaaccgtgcggtgcaggtttccagacagactgctgttgaaactctcccattctttgttcgatggccaacaaggctgtccggccttacaattgtaccctggggacgttgctgatgtggtggagataaggccaaagaccgccaatacagatgcggcgttcaccaaaggggcaaacaataattgtaccatgattgaaaaccggtcgtaggaaaggaaggaattgggaaggaatagttgtgatttcatgagatgctagcacaggtgtcgcattcaagtattatttatagttaccggatagcccatgagatcgtcacagcccccaatgttgatattttcccggccagcacacgagtaagctagtgatacttaatttaccaaaattgtttagatccctcaattctagtcgtatccactatgtagcagcacattgtccagtggggtccacgcgtttgtttctagagtaggtctgaatgagagcgtcggattggttgacaagagacccatagagctaaacttattttagaaagcgaaatgcagaaccaatcaacacctgaaaagataaatggtgatcatccaaacttttgttgacggcgtccagcggtctgtgttcttagagagttcaaatttagtaataattacgtagcattactagtctagctgtgtagataatccaataggaatatttttgggatttccccccaagtaggggtaagctgaacggttatgcccgaaaggatgcatttgctctggctgctgcaacgtcgctgccgtcatcgtttttgttagaacgtatagcagtgcatcctatataccctgataggagtagcttgaaagctagagtacgttaagggggctatatcatgatctcccgaaaagaagcaatatagtctcggacaatatgcgcagcatgggctggagcgttctcttgttagaaaattgatggatcgtcgagtaatgttggtggaaagacggccgtttctggcgccaaaagttgtcattttcggcgtcattttcacaggttctcatattctaggtgtacagtggttttgtcgggcttggtctatcactcgatatatattccacttcttttatttaattctccaaaaacgctctactgcatttcgctattgattttatggctgcacaacagtccatacctgtggaattcagccatccacttttccagtggcgcagagctctacctaaaatgttatattgctgttttagattctaacgtttgacaccaagcatgtgtgcctactagtcatattcattatctcagcagatctgaaggtggagaataatctggtttggattgaggatccttcggtcctgcaagattttgcgcgtgcatctctcggaaacccactgcgcgacgatattgaagggcatcatcccctagaaataatagaatactatatgagcgaagcaaatgtaaagtaatctcaaataacgactcacatggtccgcggtcaaaatcaatcgataccattccatgatcagcttgatctcgacctgtcgatggcccaatggcaaaatgaggctgtttggcatgagtgctatcgctctgtatttattggacatggtggtcacctgaccatcagcccggcaggcaccaacccccataactagatagtcgggcattctgcccttcaggaattgacaactctctccctctttcatcgcatcactacactgcagtcacatcagtattaaaacacattctttttgatggtcggtgtcacatgagtaggaaaggctcccgtatttggtgaaggaagtagataaccaagatgtttggtatcctgcgattgctttcacaatttcaaatctatcttcgatgcccatcttgtcccaggcatgacctagctggatacgcccaaccttttccatgatgatgtattcggcaccaacagcgttctcgcctgctttcgaactccaggctagaacacatggagcaggagtacccaaaatattgcgaaccttacgaagattagtgatcatcaaagagcaggtagccacacagtcaaggacgccttacaaattccattgtggcgacctcacttgctgtcgtaaaatgaggctgtccagcattggggtttggcacctttcggaccacttcagcgccatttgccatggtgaataggaatgttttgttaaacatgccatcggggaatttttcgatatgagcatattcccttgagccaacagaatcagcggcaagcctcgcaagctcattcatatcaaacttcacccgacgtattgacagttcatgatcttcatttgacacatttagtccccttgtgtattcgaagaaatcgttaaccgagttccaattcttggaaagacatgacctcttcaaggacctggctgattgtgtaaagagcctgtgcataacggtgaaaacgaatggctatgctgcggttgcgaagatagtacaatacatggaaggtttaagcaagttcacgcgctaggtgtggcctacgccttaaacccgttcaaaacataatgtcgaattttgtacagcgtaatttaccactaggccataacaaaaaaattaaggttcctgtttagggcctagaggggccatatcccattcttgacacataagcaacgcgcgtccagcctcttcgcgtggcaataccttatcaatccattccaaccttgcaaggttcgattgagctgcttactaatgatagaggtgagcgccgggtgagaacgagggtcgctcagacgccttggagagaggggtacgatactcctagtggccttgtctttgccatgttagtttgggtactttatattaccagaggttgaaagtacatacatcaagcggttccatagctcagttggttagagcgctgtgctaataacgcagatgtcgagggttcgaccccctctgggaccattcttttttgttttttgtttttcgataaatcttatcagaatgtgatagttatggctcatttaagccttaaacaggaacattggtttttgttatagtctagtggaaaatatgctgcacgattttccgtcaaatcctcttctatcagtatccatcattgctttttgcttttacaaagctgtaataggctttaaggtagcagtattaggactacgtagccggactgaaatctacccagtgggcctgactctgagcgccctcataaaagcggcagcatctcacccgacagaggaaatatgtacgtacaacatggagtcacctaggtggtttataaagtcttcttatcgggcttagtctgtcactcaatgccttcaccatattgtgtcagtgcgagggcacgccatgttccacctaattttatcttattttctgactctgtgtatgttgtagttagaagaaagctgattatatatagtaatagtccgtggtagagaaataccctccgtgtcaatagactatctgacacatttctaatattgcgacatgatggcgtgttatcagtaacgtgctactagatagatatcactaagccacctatttccccgcagctataatatctaacagtaatccccattttcccgctcatcctcagcaacaaaatgggtagcataacagcaactacgttccaagatccttttcaaaaagtcccaacgggccgaactggtaaataatacgattgacacatccatcatcatccatgaacccgaattaagaacgcacatctagatggcctcgcagctctcgttgggaagttccgagaggataccgatcccaacagaactgatctccttgtgggagtgtataaaacggaggagggaaagccgtacgtgttgccgagtgtgaaagaggtatatataacgtctgaaagttcacctttccaccctcagcagatcactaaatttttgatattcgttacaggcaaagaacagaatcttcaatgatcctgattggcatcatgagtatcgcctttccgctctaggttcccagctttatagggacttgagcgccaatttgctttttgggcctgaccatcgtcttttgcgggagaaaaggtaaacggagaccgatatgctttctcaaaaacgatcgagggctgactttcccgctcaggatagtttcaacccagactctcggcgcaagtggcggatgccatgtcggcgcagtgctgttgaaaaatcattatggaccatggaaggagaatggaaaccccgagattttccttccgagcgactcctggtgtaagttgtcgctagtgacattatacgaaggcaattctgaccgggtcatagtgaatcatcctttcgtattcacgtctgcgggaattaaggctagtcttctgccttattttagcagcaagacaaacaatttcgattctgagaggttttcagaggccatcagatcgttgccagctcaatccgtcgtgcttctccagtccggtgcccagaatccaactggatgtgatccatcaccggatcagtggcgagagttggcctcgatcttctcccagcgcggtcatttggcattcttcgatgctgcatatcccggatttgcctcgggagacattgatacggatcttgccggtgttcgtttgtttgccgagcaagaaatcccgcttgttttcgtctcaacatacggcaaatccttcgggctttacagcgagcgcgttggaattctctcgattcttgttccaagcgaagaggtggggaagaacatagaaacgcaattgagactactcgcacgagcggagtccggcgcaccgcccgatttcgggtccaagattgttgaaacaattctctcggatgagactttggagcgccaatggcggcaggaagtgcgcgatatggcgaacgaactcaagcgccgtcgagttgcgctaagggaaggattggagaaattggaaacgccaggtagctggcggcatctcactgatcagaacggaatgttttcgtaggtgttaccaatatcggacctagggagactcaagatactgaccttctttagatatgttggactgtccgtggaacaagtcactcttctccgagagaagcaccatgtttatcttcaggactctgggagaatatctatcgcgtatgtttgatcggcatattttgtgaataggcggtgagctgacatttctttttcttagtgggctcaacgacttcaatatcgattacactgctcgcagcatcagtgctgtcgtcaaagctacaacctaaattaacttgaaacgggttgtctcatcgattgcacaattcagacagggaggattcgactcgagggcatgatattcgcgtctgagttacatatgaattaggacaaacatgaagtaagagaaaggaggaatcaacaaccatatctatccataaaagctctgaacgaggggacctgcagaagttgtattgccgtcagaagtttctctgggcagtaaataaatactttggacatgatcgcattcacatgttgtcgctcaattgagtcaatatctggacgaaagcgtgtaatgattgaatcgagggcatactcttgattaggcattggatcttgatcataccaggaatcacgacctgggcactataccaaagtcaccgagaaagaattcctcagtccgtaggctttcgggggccttcacagctcaaacaagccccccccccctgcttccaaagctcgataaatggtatgatttgctttagtggccataatttagcgtgtcatatatgaatataaggttctgctttcttgttttgacgttaattctaaagtggccataagaatcaacccaagatggtcgtcccatggtactcgaggttatcgtcaatatagaagtggatatacgaacctagtgtggtcaagaccgactgtaggtggtgcagtcatatcaatttgacatataatgtaagagacttcaaactatgagggagggtatcgtcacaaatatttaatatcgctacattttctatgaaaacaccaatttcgagcttttccaatctgtttatctaccaagtccagcattgtgcactctaaggcaggctgtattgcaatgcggatccagttgctgtgatatgaatattcggtcttgatttgcaacagaggagtgccaattctatgcagtgatgattcaatagagcttatgtacgttagacgccgaggaatagtgcggtaggagtagatatttccatgtcttcagcttcaatgacaagagagtcactacatatgcactttgatactctctgttttgtagtaatattatgttatctgacaagtgatgagggtctaatagctccttctgtatcatgacctttgtttgcccgaattttgttgcagctgtcacaaacagcccagaacttccaccagtcctaatttcgcccccaggcaattttatcaatcaaacttcccttcttgttttatcaatactgtgttttcacccattcactcccaaccctccttttgtcaacatcatcacaaagatggcttccgttagctttgccgagccgtcttttgtcgaacttgttccagcacttgttggagagtctaatttctctacgtggactacttcactcaagtggaccctcgactcgcgcgacactcgttattacgcgcttctcaccggcgcgtggagtgaacccagcgcagttgaccccacacagcctaccccggctgaagtcgaggatcgtacccagtgggatacagccagtcgttacctccttccgctactgaatgccactgtccaccacacggccaagttctatattctcgatgccaataacgcgcgtaccgcatatgccaacctccaccgcgcgttcgcagcccggtcttacgaagctggtttcgccaatttcctcaagtttatcaacaccacatacacttcaaacagacctcaagctttcgtcaatgagtggcgtctcgccctcggcgagctccaagagtgcaattcgacaaagctcacgcctctcctcatcttttaccatttcttgaacgctgtgagcaccaacccagctgcgcatgagtggctcgacggcttcctcagttcgaaagtctccaccgatacaaccatcgagtcaaccttcacagactttgtcgtttttgaggaacgtcgcctccacgctctcaatcaagctcattcacttagcttgaacaaagggaatcacctgccatacttttgccagtttcatcaacgtcaagccggtcattccagtgcgaactgcttccgcaacccggcttacttagctctggacaaatcagctccagctcccactcccgctcccgctcccgctccccgtgcagtcactgaagacccacctgtggagtagagcagcatctcaccaactaggggctgtgtttgtgggtggtttgccacaattgttcatggggaggtgttcggattggatggttccgtgaaatttgagtcttagcaacaatcaactcttcgcatgttaccatgcacattgatatcgtccttcctgtaggcgtctctcgacatgcaaataagaaatagtttagtatgacaaggctttggccaatgtcggagcaaaataaaaagactaaataaaaataaaaatatctggactcgcggggaatcgaaccccggaccactcccatgctaagggagtattataccactaaaccacaagcccagttgattggtggattgaatccaatagtgaaatgagagctttaacctttaagcacacattacacagcacctcacatatcgttcagttttcacctggttccattgaagtgcagccaccatcctatttgttattcacctacccatccatcaacatggagaatactttggatggaaatagaaagagatgtgacattgatggctttgttcaagtgcctcaatctgttttgttccaaccacacccttgtatacagactttaactgcagtgtatctgttggactgaaagatttctagtagctgattttccaggacatcaacacccatctcatcgtttgcccagtggaatgccatgaccatacctctggtagatggtctgtgcctgatggcgtcattgatagatctattcaggctcgcagcgagctcgaggctgatggccggcgggatttctcatagatggaacattgtggattccttgccattatcattttgtatgactgactgtaaagaaatacgtgtaatctatgtctgtcccgatttactgatctttgtcatgttggtccttgcgcaggtgctttgaagtttagtgaattcgtcaaatctgataccatattatattatttacactcaatttgcaactatcctctaattggatgcggcgagcgcctgcctattcgcgagacttcctgatgccctaaacaaagccggattcctgaggaagttctcgtgcgctctgaactcccccttcggtttcttcggttccctcatcatggggtctctgccataaccaccaccaccaggggtgttgacaatgatgcgatctcccgcacgcatatcagccgatgatttgccgctcatgccaacatggcgcacctccccagtgataggatcatgtctgacccatatattaacaccgcgcatgccttcacacccaccagcaaggccatagggtgcattgacacgtctttctgagagaatcgagacctggacggggatgcggaactcaatgtcgcgaacgcagccatcacctccacgatgcaacccggctccaccactgcccttccgaatggagaattctcgaaggatcactggatactgtctctcgaaaatctcggggtcaccaatgcgggtatttgtcacacctgtgtgcacaccactctcgccttcccagtcggcgccggctcccgctcctccggcaatcgtctcatagtatccgaatcccttgagaatctcgccggtcacggcatctttgcctccgtacccgaaggtcaggttgttacatgttccctgcgatgcagcggctgtgtggaacgccttgaagatgaggtcgatgacgcggtttgtcgtctcgcctgtcgacccgactgttgctgctgtgaaggatggtgtcaggagtgtgcccttcgggcagacaatattgatgggttgcagacagccctggttgagtggtatgtcggaggagatcatgcaacggaggcagtactgggtcagtgttagtagtgtccgcaagctgtcatgaaaatttgacacgggggaggaagaaagaaagagggagaaggtgtgtgaagacttacaagaatggcagagtacatgcaggctggcgggcagttgagattaccgtggtgctcaggtccggtgcctgtaaaatcgaaaatggcctctccggtctccgaattgatggaaatacgcagtaccaatggcgtaccgtcgtcggtgtagtcgatggcctcaaggtcggcaccctcaaaccgttccgagaagaccttgagcagctcccgcaccgactgagaagcgttttcttgaatcgcattcatataaaactcgacgacaggccaagtatactcattaacaagtgagcgaatgagttgaatgcccctctgattggacgccacagcggccttcaggtcggcgatattgtctttgagggtacgtgtgccgctgcagccgggatacttagcgggctcgttgtacaatatgtcgatcagcccttcctcatcaaaaacaccctctttgatcatcttgaacgactcgaacgacgctccctcctgccataactccgtcgagttgggcggcattgacccggggatgataccgccgatgtcagcatgatggccacgattgcccacatagaagagaatctttgtcgggttttcgtcgttgtcaaacacgggcgtgatgcaagtgatatccggcagatgagttccacccgctatcggatggttactcaggatcacatcaccaggcttgagctcgcctggcttgtaccgcttggcttggtatgcgattgccgaggccatggatccgagatgacccgggatatgaggtgcgttggcgacaagacctccactggcactgaagacggcacaagagtagtcaagtcgctccttgatatttaccgagatggatgtcttttgcattgcgttgcccatttgctcggccacactcatcagccgatggctaaagacgctgagaagaattggatcgatggcctccgtactagcaggcttacgctcgctatcagtgatctcgagaatgatgtgctcggggagcttgatagccttgctgttgctgtcgaccacaattgtctgagtcttgtcgatgatcatggctgggccatggacccgagcaccggtcggcagctgggtaaggtcatacacgggagtatcgacccacccctcgttctcgaaatagacctttgaaatggactgctcgctaaactcaggggaagacaacgactcgagcttcaggagctcagcgaaagggtttgaggtgtggacgtctttagccttgccaacactgcgaacacggacgtcatcgaccaggatatcgcgctgctgggagaagccaaattcctgctcgtgtcgacgggtaaatgctgctccaaattctgcaagatcatctggttgtcggatcatcaacatcgtgtcacttccccggtaccgcatgtttagatacatctcatgctcaatggactccaggccgaaaccttgggcagctaggccttgctcgccttgtgaccgaagcttcttgaagcgagactctacccttggcataatatcagggtggtaaatcagggactcgggctcttggttttcgacagtcacgtcggcaagagccataccgtatgcagagaggatgctggagtaccgcggaatgatggcgcgacgaataccgagatctcgggccacgaagactgcgtgttggccaccagcaccaccgaagcaagccaggttgtggttggcagtctcatagccacgtccttcacttagagtccggattggtcgtgtcatagttgcattcgcgatggacaaaaagccacaagccacctcctccggtgttaggagagagtcgccatctttttcctcgttgatggtggccgttacatccagaaacatagtagtgactatgtccgtgttgagaggcttggggaatgattccttgataatccgaccgaggaagaggttggcatctgtcacagtcaaaggtcctccctttccatagcaggctggcccagggttggcaccagcgctctccgggccgaccttgaagagaccattctcccaggacaaaatggaaccaccacctgcagcgacagtattgatatcgagctggggtgtctggatagaaatctccgcgagtgtgctctcgaacacatgttcaagctcgcctgagtatcgggccacatccgtactagtgccacccactaatttatattgttagttccataaatcatcctcatgatatgacagagaagagagcttactgtcaaatccgagcaatggtgttgcgtcactggggtcatagcaagtccttgagacgccgacgacaccgccagcgggtccactgaggacaccgcgcaggccagcaaaatttttgaagttagtcagaccgccgtctgactgattgaggaatagtttgtttccgtttttgtcttcgagcaggcccttgaagccttttcggaaactctcgagataacgtgttgtgacaggcgtaaggtaagcatcagcgacagccgactgactccgcggaatcagctttgccatggatgaaagtttggaggacacagcaacgttgaagcccattcctttggcgagatctgcgacggcaagttcatgatcggggaacatgtatgaatgcatgagggcaaccgcaacatcacggaatccctggtcccagagacgcttcagatcgagacggactgcatcgaggtttgggcttttgagaatcctcacggcctcccctgtgataccttcccgcaggtcaacatcggcactaatgtcgatgatagttggttctggattttcgccccatccttcgatggtcacacgctcatctacctcgataacggtttcgtataacttgtccaaacgtttcacggtgagatcgaataggtctgggcgggcctgatttccaattttgagagcttcccggaagcccttggtggtgatgaaggcgactctctcgcccttcctctccagaagtgcatttgtggcaactgtggtgcccatgcgaattgattcaacgcattccaggtctagcagagtcccgcgggggatgctggctcctgttgcgatttccagaacctgtcgtatacattccgttggtgcgtcgctgtactcgtcgggagactcagatagtactttgagaatgacattttcctcgcggccaggtatttgagcccaggcgtctgtgaaagtgccgcctctgtcaatggcgatcagaactcccttggatgccattttgttgctgctcttgttctccttcttttctgattcaaataactagatccgtgatgatttacagacttgcatggaaatattcgccgtttaatagtcacggcatgcagatgtccaggccgatatagaccggcttagggttagatttgccgaatgtcgggaagtgcagctagcggccgcgggacttgggagataagcgtatgggcgggggactcagccgggggactcaatcagctattttagtcggctgaggagcagccaaaccttgttaaatcggtaatacgctgcaatgccgatccgctttcccccatgataggtactggtggcgtccactaaccccaggatgcagataagccatacccacaaattgtatgacacttaggtaaatataggataaatggactgaggtagccaggcattccccatctcactgggaagtgtgttgaactttcacttccgaattctatattcacttaagacctagctcacttcaaagtcgagcaatatcatgacggagcccgagacagagttggacatgcttaagtctgccaagatgaccaaggaggcctcgaattgcgatgaccatgagcttggtatcacaattgagacctatgatcgcaaggccgaaagcaaaatgttgcgcaagtttgacgtgagtttggctgagtaccttgttcaagacgccatgagtagaatggagagagggcatgatactgataatcttccattcagttctttgccgtcatcccactcggctttttctacatgatggctatactggatcggagcaacctaggcaatgcacaaatcgctggcatgcccgaggctatcggcctcgttgggaaccaatttggcaccgctaccacactactgtactaccccatattgctagcatcctactgcgacgtctctaacggagacgtagatatgctacttatgttcccttcgaagccccgatttcggtgttagtcaagagtgttggcccgaaagtccttatttcggcctccgccttttgttggggttcttccacactgggaatgggtatgaatgaaacacatccccgaagccagcaaaatcctttctgacacacggaacagcatttattacaaactacaaagggctctacgtctgccgtttactgatggggctgtttgaagcaggtctcatccccgcaagtgaggtctacatggccctggtttacaatcggaccgaaagagggcgacgcatgtccttattctacaccttcagctgccttgccagcgcttttggtggtctgctagcatatggactgacacagattgatggacccaacggcttcgaaggttggaggtggctgttctcagtggaagcagccatcaccatcattctagttcccatcttctacttcgtgttcccgaaaacccctgttgacgcctggttcctgaccgatgaggaaaaacgcatcgtccgggcacgctacgacaatgacccacattgggccttcgatgagaagttctcgtgggttgagcttggtaaagttttcgccgatgtgaagttttatgccttctttgtctaccagttctccatcaacctcacacagtttggcttcactacctttctccctactattatttctggcctcggttacacctctattcatgccaatctgatgaccgttcccatctatatatcggctcttgcgttcttccttgtcatcgccttcgcttcagaccgttacggtatgcggggaccgttcatggctggccctgcgggtttaattcttatcgggctcaccttgctggtttcagttgagaatctgaatgtgcgcttcttcgcttgtttctgtgagccatatcgatcttaattgtcccttgcgattaaggaaaagactaacactcgaacagtgaccgcattcggcctatatccagccgcagcgctgtcgatgatgtggctacaagacaacgtcgcaggcttttataagcggtccagcatggtcggcttcacgctgactctggccaatacggccggcgtggtagttgggcaaatttttacctccgataccaagccctactataagaaaggcctttcaatttgtctcgggttcagtgtcctggccattgtaattgccatagctctgatggtgggcatgaagatcgtgaacagaaggagagaggcagcaattcgtgcggcagaggcggccggttctccactcccccgtcaacccgagatgggagactgggacgtgtatttcaggtataatatctagagtatgtgtcgaaccacagagattcggaataagctggtatgccagggagctggactggatgggttgaaaagcgctgtctagcagcttttgataagtgtctcatattccatgtgctattgccatgtcaggcaacaggtgtcctttacaattgatgtcctgtctataataaatgatacgtaatatcatattgcactatggaggttagaatagtattggaagtcatactattgaccaagtcagcagtagaatatgtagaatacaacacacatagtattttggccctcaatacatacaccccttcaaaactcagattgatactgttattttacatattgtttacacattgtttacagaccgctcaggtgactgttcatgtgactctgggatttttctgccgattttcctatttttcggaggagctcccgataaccttcaatccgatgcgcaaatgagaatcctcaaattttgtggggaaaatagtagcgtcgccagatatctccaatcatgaagtgtctagctatatatggacggagacagaaacaatccccacagataagacccggcttgtgctagaacatcccgaggctttgagccttgctgccgatatccaccctctggatcctggatactcagataatttcggctcagcgtgctctaacaagtacttccgctttagcttgacctagccttctatggatcgtgcggagtcgtctggcggcgagtcgcaaagacgcgcgaaacggacaaagaggagctcggttgcgtgagcaaacacccatgacccactcttgtcatttgagatgttcaagctgaatcaattgccctcagatgccggagatgtcatgcccagaaggtcaagtgctctggaggtaccccatgcagtgcctgcttgaccgctggccaggcgagtgcttgtaactatccttttcgagagcgaaaagtcacaatatctgagaggtaggtaatttcctcccagcagctggtctgtacgcgattatatcttatctaagagtgccataaagctacctgaaacaattggaggccgcctcgaatgctctcagacatcaaaatgaatctgcccgcagccagccgaggagtcccattgacgtcgaccagctacttgactcgacgataacatcagcagtatcagacctcggtgtcgtaaacccgttgttcgatgcacgccgggagaagccacccactcagatcgtaacggaaccgtccttcgttggtgaagcggcatgcgatgcctttatcgagaggcttctgcagtcgctcagccagagagaagccaactcactcccgccaccgcacaagtacatgatagaccttcctggagcacgtatgcccgccattaactataccctacccgaccgagtccacgccaagctcctgatccaggtggccgcgaggttcatcggaaatggccagcatctctatttaaattcgtatatggaggaggtcgacagtgtctacaaaaaagatgccgaacctagctctatatggttgtgtaagttgttagcattggtcgctcttggtgagttgtactcgaataggcggcgcagtaacggtgacaatagggcgccaggggaggaatattttgtatctgctttgggtatgttacatgatcaatatgaagataccacaactctacatgtcgaggtttatcttttactggttagtcactggatattgtcgcgtctctatgaaatatacctaatttcggcaggcctgttactcgaatgcactcggtcgcgttagatctgcctacacatattcaggtattgggatgagaatcgcgctaagccttggcatgcatcgatcatcatcgtctctacataccagtgctgtcgagcgggagtcccggcgccgcatatggtggtctctttacctttttgatcggcttacttgctcgaagctcggccaaccaacggctgtgaatgacgatgacatcgacgtggagctcccgacgatggatgggttaacacctgaagagaaggaagaatttccagatccacgccacttattcgcgagcgttggccttgcgaagatagcaggagacatacgtaagcagttctcctctaactagccattcttcctattcacagggacataccaggctaacactcgaatacaaataagtgagcgatatatactgtatgccaggacgaaagaagatccacttcgtgaagagggtccacggtattctaagcaacctccgagactgggatgacacgctacctcaacacctcgctttccgctgggacgattcaaaccgccatgtcgccagtctccacctctgttacaaccagtgcataatccacacaacacgaccaatcttactacacttattccgcgtgcagttctgtctggatgggtcccgcaccgcagaccagccatcgcagagcttctcgccgacgacgacggcgctggctgatagctgcgtaaatgcggcgcgtacatccaaccgcattctttccaagctatttgttgacggcacattggctattctgggctactgggacgcgcactaccttttctcttctactctgattcttctcatgtccgccgtcatgagccccagtcaggctgtctctgacgctgttgacactgctctcagtgtgctatgctccatgcgtgatgatggtaacgttcccgccaatgactactatgaacgccttcttcttgtgcagaaaagcattgccgagctgagggatggagtcaggaaagggagagatggtggacccccaaccgccgcgcagagtcctcaaatcgcaggcacagcccatgaaagggcacagttagacgaggttggctgggctgcacagaataatgacgttggaggtgttgggatcgaaaatttcaggctcgaggacaatcttgacgcgctggccaatccttatattgacggcttcttggccgagaagtctttcacctggccgtcgaatgcatttcctgatggaactaccttgcagcagtttgcgaacgagctcggcgttagctttggcctactcgaccctcattgtggctagagggataccggacatactaaactcttcttatttgattctactgtgtatgcttagcgcattttggaagacttctctggcttaagcaagggtataagctgcattgaattcattttcaaccctggtagtagatatcaccatgtgtagatgagacagaatggtatgaaatgactacacaatggctgctaccaggcaaggaagaccactagcagaaaatacagatacagctcagaatactaacgaccagtgagcaatgtaatagcgtttgcacaatccttcccagctcgggccaagatgccagagtcttgctgtaccagaatgaaaccggctccgagcttattcaaagcccagtcatgcagctcttcattctcgtagataccagcaagaccgaatgtcttgccatgtttcttgcacgcccgactcacggcctccacagccgactgaaatccatcgctcttgaactgtgcagggaccccaagttccgtagataaatcgttcgagccgatcagcagcacatctatcccatccacggaagcaatctcgtccacattatcgatgctctcccgggtctcaatcatcacaaaaacagacgatgcattggagttattctcctgggtgaaaacaccgaccggcgtcgactgaagccggaaatatggcagctggcctgtcatagacctcttccccgtaggtggatatttgcaaatggacactgcgcttagggcatcatctgtggaagcgaaaattagtaaaagaaagaaaatcagggtatgtttcttacctttgttatgaatatggggaaagatgactcccatggcaccgccatccaagacgcgctgcacgaagccgtcgccacactggtaggggacgcggacaaagggtgtgatacctgaacccaggcccgccatacacagcagacttgcatcattgagagatagcgtcgagtgttctaggtcgataaagagcgcatcgtatccactgttcgccgccaactggaccacttgggggttggtgactagccggataccgaatgcctattatcaccagttagcagacagataattatcacacagcggtcactggaaattagacttgccttgcagatttggcccttcgccgttttctgcagcaggttattggtgtagctggaacccataatgaacaaaataaaagtcgaagtagaagtaattcgatttgacaacttgtaaatgctttgagaggagtcgagatatcttgacacaggcaaatccaatccgctgactccttttgtactgaccaggatctatagatgtttatcgggaccggttagtgcaggccgtacccttctttttccgggtcggctcctgagctgccgtgccgtaacaagaacaagatcgggtaggctgccgactctgtgagaaattacaccaagttcaccttcaaaaatatcgggttagtatgccggagagatgttggggttatgtatttaggtgagaaattctgcgcaagaaacgcggagtagcaagagtctgatacgagtcttgccttccatttccctctccaaacttcattcgatcgaaaaaaaaagatgtttgacaatatacccccgggtcccgcagaccctttttttcatctgaagaaaaaggccgatgaagatgaccacccagacaaggttgacataggggtaggcatataccgaagcgagcaagggacctaccaggagttggctgtcgtaaaaagggtaatcatgccaaatcaagacaaagatgatgagacggttattaacgagaggtacccataggcaaagaaaatactggagcaactcgagttggggcatgatgtaatattccgcatatatcaaagatcccaaaccgcaccactaaccaataatttagtatggactcactactggggatgatcgattcctcaagctcgcagcggaagtcatgtttggccaagaaaatgaagcgttggtatcggggcgggttcgtctccacagaatatttggatcaccatatattaatttcccaaactagatcgcatccgtacaaactctctcgggtacaggagccaaccataccgctgctgtcctcatagctagactactggatccaaagccagccatctacctcggagtgcctacctggaacaacatgaagccgctctgtgagtatgccggcttagagaccatcgagtacccatacctagaccgtgagacatccgaactctccttccagccctgcatcgacgcaatcaggagtgctcctacagggagtgtatttgttctacagggctgttgccacaacccgactggcaaagacatcacattggatcagtggcagcggttcggagaggagataaaagcacggggtcacctagctttcatcgatatcgcctaccagggactcggtgatggattggatgaggacgcagcaggcgttcggatactatcacgtctcggtatcgacatgatcgtatgccaatcattctccaagaatttcgctctgtacggcgagcgctgcggagttcttcatgtagtcacacggtcagtcgaggctgcgaccaataccaaagaccagctgcggagcctaatacggcgcgaatactcctcatcgccagcgtacgggtcgcggttggttacgatcgtgctagaggatcccgagctgcgtcagcaatggtaagggacttgctagtgaatggtcgttatttctactcactgatgattgattttctataaagggttgatgaactcgcgtccatgagagcaaggttaattcagaacagacaacgactatacaaagaactgtctacgattttgcaagtaggttgtcttcccttgtgtccctatcaagattacaggcgctaacataatatactttacagacaccaggcgattggaaacatattgtggaggagaaggggctcttttcgtacatcttgtcctctcccccaaaacgagtcgccataactgaccgttgaccaggtgcctcgcgatcacccccgcacagtgcaatgccctcaatgacaactaccacgtgcatctcccggtgagcggccggatcaatgttgctgggctaaacaataataatattgagcggacagctcgtgcgatagatgcagtggtccaagggaatcgttagattgttgattggcgtctatgattgtagcataacatgtgctttgatctttctcgtatcaaagtttactagaaaaatactctatagccgacctccgaagcattattgctgataacttcaatttctcgagcataacgaagtaacaccgccttcagagcctattaacaggagggtacgatttatactctccatataaaaatagcacaaacctccccactctagaaatcaatataagttcctgaagtttaaaaatacgattctggtttacatatcgacctacctaccttttcatactaccaacttatcaaccctatcattcaggaaattcaatcaagatgctagcaacattgcatcgaaagtgacagaaactgcaaactgtggatgagccaagggacagctacccttctggggactgggatgggaaaagttgaaccgtgagaatgaggtaacaattgtcagctaggagggtaaatcacttgacagactaaccatgtcccccgtatcgctcttattgcaagatcgtttttctcgtggctgacaagaaggacagcaaatgttgtgaatacatttatacatccatatctccgatcttgatgcctgacaattcctgtaattcctgataattcaggcatcacggccttggcattttttcacactccacaccggccaatgtcaaatgaagggcgtcggcaagttcgggtccgatggcaccgaaagttttctaacatccccaatataaattgctggtcctagccaagtgtatatacttctcggatgttttagacggaaaggttttcactattcttacatattgtctcgaattgattgacaatggcgcattccgattcagaacacaaattgaagaaaccctggattgaaacgcctttgatcgagtcggcaacattctcaaaggctgccggatggtacgactgcgtttttattttccctaatcaaatttctgagctgactaaaaatgtcaatgtagtaaaattttcctcaaattggagtcgctccaaccttctggctcgttcaaatcacggtgagttcgacaatccaaaaaggaatttgatacagaatctaaactagttcaggggaattggaaacttgatcctcacatctctttctgatccatcaaacaatggcaaaaccctgcattttttcagctcctcggcaggcaatgcggggctcgcagcagttatagccgctcgagatctcggttgttcctgtactgttgttgtgcccgttagcgcgaagccaatgatgatccaaaaaatacgcgctgcaggagcttcggatgttatccgccatggcgccagttggttcgaggctgactcgtacctgcgaaagaatttcatcgaaaatgaggacagcaaatcagatcccttgaccaggaacatttatattccaccattcgatcaccctgacatctggcgcggtgcagggactctggttgatgagctagtcaagcagttacctccaaggcaccacggaaaaaccgatacctgttgtccgttcccagcagatgcaatcgtttgcagcgttggtggtggtggtcttttgaatgggattatcgacggccttgagaggcatttgccagtgcctcaaccggcaacacttccccagcaagcggcgaagaaacttcaaatcctcgccgttgaaacatccggcgcggattcgctggctcattcgctacacaagggttacttacaccctctacctgcaataacatcgcaggcaatcaccctaggggcactctgcgtggcacagcaaacactgaagaacgctcaatctcctccgcccggtatcaaagtcactagtattgtgggtaccgacgccgatgctgcgaggggagttgtgcgtttgtgtgatgagctgcggttggaggtcgagctggcttgcggaatcagtgtccaagttgggttagataggctaagggaagtcatgacagacctaacaccggatagtcgagttgtaattgttgtttgtggaggaaacgatgttagttccgaaatgattacgggttaccggcaaagttcgagagtggctggcaacgaaaaacgacgggaatcgatgttgtgaaaaatctgatgttggaactacatttggttgttgaaagatcgtgaattacctactcccctggtcagacccatctgtattgatgcttaagggtaatattatcctcttgctctcatctaacctcattccgtgtctaataatgataatcctcgttaatcccacactagcgagtctaccattgcattaagtcttcaatgcccaaatatcactgcagtcgaagagatccgtgatcctcggcttcatctagcgcatcggcaatacgcgacccctctccctcgaacagcatcccgtcgtaagtcgccgcgcctaaaacgcagccaacaataggggcgaagaggggaacaacgaaatagtagttggccgccgtaaacacctctcggccatagacgatagcagagaacaatctcgggccaaaatctctggctgggttaatggcctggttttattagtacgatttcctaacctgataacctgggaacatacataaccggtctgccagcccaatgctgctccgatcatgagcagcagcagaaagacagcgatctggggagcaggaaatcgacgggcatttccaggatcggatatgctgagaaggccgaacatcagcacagctgagcccagcatctcagaaaagacagcctcccagttcgactggaagaaggcacctgggtaggtcgagaagatgcccgctgaatggtgaccgaccgggctcaggattgatccgccgggaatggtgtattcaggatcccaagctttaatcgccgaacggtagttgatatatacgatggcagctccgacaaacccgcccaggaactgcgcagccagcttgcctgggatttgtttccattgcccttcagatggacgtacaagggcaaggcaaagagtcacggccgggttgatggtcgggccgggatcggataaatagccggatagacacacggcagcagcccaggcgaggttgatagacagccaggtgccgtagttgtagtcggagagcagacattgggcgacaactccatccccgataacgattagcagagcagtcccgagaaattcagccgcgtatggcttcagtgcccgacgagggatcatttcggtgaagatggtgttgtaatccgatgcccttcgtagatacaaggtgggatgagggacccctgattccaaccaaggttgatgtgcgtgtttacataatttaataaaccggggacggtgacgtcatattgctcggatcttcctccgatatgcccaatacgggatgccgattctcccgatatgggaacaagttgttgtcccaaggtgatcaaatggggtttctactgtactgcttttgcacccagtcttcgccgacacagaatactcgactacatatttatgcactaatatgtgattttctgcaagtgaaatctagtataaatggcacttgcattgtaacaacttgagagttctaatctctttcatactaccgactcacctaaatctatcggtctgaagaatgcaatcatcatactagcaagcctatatcaaaaacgatagaaaccgcaagtagtcacctataccaagatcaagggatgcctatcatacatcttcaatatcaaaccgcatgttcaggcgttgaaggtattcaccatcatggaaagtaacgatcctagcaattcgttttctgccttggccccacgcacacagaacaaaagctgcaaccgtcttaccaattgcagtacccagcagggcatcaaactcgcacgagggagtccagatccggtgttcactagaagggtactcaatcccctcggttctatacacttcatcacgaacacactgtaccgtgtcagtttcaaaaatagaagtaacgaatacatattcaagactgttaagcgaaaaatccacctcataggcagccttagttaattctgatatatgtggagcggtgcttcgccttgatcgacggatccagtcaaggaagaccaccccttgtccagtgcgtccctcccagcccaccggtggaccttgtcgattatggatttctatcttgttaagctcatctggtagatcaaaagggtagatgcaggtatcccatgctgaatcccaccatacagcttcgtgggtgacagaataattctggggttggggatcatatgtcacagcgaatgcggatctagggtaagggcacccgggctcatgttcacgttcaatccatcttcgtaggcttcgtcctttttcttcccatggaaagtatctaggcattatgggttaggggctaagagatagttaggagaaaaggcctcgaataatactcaccaactcgtcaattaaactggatttgcagacgctatctagtacctggctttatatctccgatatcacagactgaggacagagaaggtccataaataccattgtttgaataaactctaagtaaaggacgagtacaaaggataccactatttaaggggaaacaataagcctggaaataaaggaatctgctagagagtgaaacaggtgttagctaaataaagcactggtatcttttggagatagtaattgattctcattctgtttatttcagtgaaggttctatttgagtaagattgaatgggcgttttattgggcataccaagttacttcttgttctctttcgtcattttgttccatattgttttctgaccaatttggcataagatgattattggaaatagctagtccagaataacccaaaactcctacgcgaatttcccgatacctggcttggaactaaggtccgttcaatttgaagatactgccatgatcaccagctacttgattagaactcactcaatagtgtaccatttgctagcaaaagaatgctgaacccgggtcaggttgtttttgaaggtgctcacaagaactatatatcctccgagggcgttattatctagcctgatgtcttcttctgctcccatatgtcttcccaggggtttgatattaattgcacccctgatcaaattttaaaccactcaattgagcagcattgaatatatttccctatatcagaccataacatacctgaagttaataaaaccgtgatgtttatactcccacaccgtcgtggcagaatcaaacatgcgccaaacccctttaggccaagcgccccaatgatagccaagcatccaaacaatccacgtagattgcaaggagagtcctctaagcatcccacaagcataatcatatctgctatccagacccaataaaggtatgtgaatatatctaccctgtttgaaagagactatccgcaccaattcgtccctaaatgcgccccttctccccgcattgcttcggggtcgcgcgcataccccgtggtatttaggccatgatgtcagcccaatggagtgtctacacgcgtcaaagtttgagtcaatctgcttgtatactaacaaaattctctatatagcgccctcaaacattcaaacctacctgccgcgttcaattaattcacaatgtctgtcgaagcctcagcatcggtacgttaatcgcagatgacaccacagcccgcgacatatcaatccgcaactaggctgcaagaatacgcactgccattacattgtcacaaacggtcctaacaaccctccagcccatccctattgaggatctcactaagatcaccaccgaggtacggccgttccccagaataccccgtagaatcaaccccgcgctaacattttactctaggcctgttcggatgccctcaagacaagccagagctacgagcatgacaatgtcggaacctggaactcccagattatcgtaagcactaacacccaaccgcgcaatagcgatactaacaattccccgcgcagaacaccgtccttaaggccctgatctccgctaccgcacctaccgatgcctccaagcctcctccctaccgcttcaccgtgaacagcacaatcgtgcagcagggcgtgattgacccgtccatcgccgagggtggcgcactcagcaatgccggtaagcgtggtatgcattccgcctccggggccttttgggatgtcaaccgcgatggcatgtggactttcaagtacactggtgctgaggagcgcgggattgatgttgttgtttgtgtgacatggtttgccgtcgtataaggacgggcctgattttttttttggcctgttctatgatgagcatatccatggatggcataaaagtccataagcggaggtcgtgactttgtctgtgagaagttccttgaactccttatcggctttgtatcacgggcttcatctttctttttcatgtacttgaacatgtgtttttagtgctctgggtatgttcagatctgctcttctctttctcgtgtcatttgatttgagttcggtctaagcgtggtgttatgtttcttctagtttagacttgctggtattcttcgagaaattggatagccttgcaaatgtctatgggacatccatggatgttacccagtatgtatacatagtgcggagaaagaaaacttggcatagatattggaattgttagtggtatctcaagactatgcaggatcctctgtgggatgaaactatggtaagtaaaaatgtctgcagaacaattcaacgacaaaggtctccattgaccagccgaaatacgccatgtaaccaggaaaaattgggaaacacccatcattgcttgcgccatgccatgtgtagattacccataataatgtcaacgccagtaaagacccatcaatcatgaaagcaaaacgccagttagttgagataactcaaccttgcatcttgcccctagcgaggctccgaatagtcatttaaagcaacacaaacggaacctcgatgatggccgctgtactggcggatgatgttgccagtgccgagctcccacagacgggcgtagtgatcactggagacagtcacgaggtatgcactgtctgcagagaaagcgcagtcccaaacccagcgctggtgattggcgagggtggtctctaggaacagtgtgtggttgactggatccataggaggcccgtcgggggatgaggtgaatgtctgttgcggtgtctcttggcgaggagggttgtcggtaatacggaggagatcacggtcttggacgggtgcgtcgaaaatgcgaagcagatcccgagattgggcgggaacctcgacaggggttaccggagcttccaccggtgctgcttcaactgtcgggttcaatgcctcattctccttccattgctgtaatgccagtttggcaggtggaaattcagcgtcgaggttccaaaccttggcagtatgatccgcagagcaagttgcaagatgcttgacatcgggagagaggagaacacgagtgagatagtccttatgcgcttggaaggtacagacggggatgattcgggtggtttcctcagtttggaccatgcgccacaagtagacgttgccctgttgaggtattagtaaagaatcataatatctgccgtgaaacaaaatcacgcaccttcttgtttccagcgcaaagcaaggatccatcactggcaacgctgacactgagaaccgcagtgtcctcctccggaatcaattgatgagtacagacactctcgcccaaatcccagacacgaaccataccggcgtggtcaccgctgatgagctcgccctggttaggatgaatgaccacatcattgaccggagcccgatgaacgtagtttcgctgcaagctaccggtacgggtgtcccagacttttacagttccgtcctcggagctggtaaccatccattttccctcgcagtggaatgccacgccggtgatgttgcttgtgtgaccttcgaaggtaatcacggggttaggattggttgacttgatgtcaaagagtttgacattgttatgacccgcagcagccaggaatctcttatccggggtgatgcaaagacgattgacttgggagtctggatgctggattgtacgtgaacagatacccgagagcgcttcccaaaagctagcagagaaatagtcagcaagagtcccggtatgaattatcgctctgtgggtgctggataaacactgcacgcagctaactaagtgccaacttaccgaatggtatggtcgtaccccgctaaaatatgcaaccaaggtaattagcttaatgcctagaagaatgcggggagcttcttatgatattccacttaccggtgcatagaatgacactcatattcgccttagttgggttcaaatgaatgtagcggggaagtaattgatcttcgtggcctcgttctgggtacctctggagtcccttgaggcgttacgggagctgtcaaggcgagacggcccagaccgaacgtaggatggagtcccgtttactgccattaccaccacgtgattatagatccacgtgagcaaagcggtgtcgctgtgtgacgataaggcgataaggcgagggcggtaaaaaggcggtgaagctgaaagggcaggcggtcaaaaaggtgcaaagaactagttacgcattattgcttgtctaacaagatccgttaatgattttatagataagctaataactctgctctagaaatttgtctaattttatacaattgaacaatatcttgtgtgaattcttcgtgttgtcaaacttactctatctctagtccctgaactagattgggcggtacgtccagcggtgctcggagttaacatattattggccaaaaataagttaaatctccagcagaataattgattggccggcagaaaaaaaaacataccgatgtagtcaaacaagtatgtatttgtcgtctctattgagctgtattgatccctattggactccattgtttggtgtaagacaatagaaatgtcactttctttgttcttgtttgcttccattttgcctgtctatgagccctaattccctcctcggttattaccatccctcctctttgatccctccacaacatcttcttgttttccctaccctcttcaatatttataaacttaatgctcatttctaattacaatggctctaattgaccccaaccagcctggctttgggcttgaccagcctgactttgggcttgaccagcctgctttcgaccccgaggcctttctcaatagcctcaccagtctcgatgccaatgtatcttctaatgcttctaatgacttcgagcattatcaaatccccgagctcttgtgcagtttcgatgaatttttcgccagtattcctctcgatgacctcgatcagtctggttttggacagtccagttcagccacatctgtcaactgctttacccaaccactatccagcaacatccctgcccaggcaccctacaggcagatgccatacgacccctcgatcggtattgcatacacctcggaggacactgacgcctccaaggtccgaagttgggagaacctcatcgcccaggccaatttggtcaatgctggcgtgccaccctctactcctcagatcatggaagaggagacagccagccaaggcctccagactatggactcgcccgactctctgttcaactctcctggcacccagtctgtcgcgagtgtcgagagtgtcgagattgttgagactcccagtcccacctcgtcgactccttgccctccccgagctcctgcagctacaactacaccttcgaatgccgcgacaaatgtgattgtaagttcttatttatgattgaccatttcattagaaatatgtcctgactgtctttcacaggcaagcgccattcctagccccaatcctcgcgccgtgcagcttccgcaagcgttgacgaaccagaagggctatgcccaacacgtttcaccattcgcacctgttgcaacaattgctcctcctatctcctcgatgaactctcgcgagcttgagaacgcgcgcgctcgaattcagaccttggctagagaacgcaactactaccaacgtaatttgcggaaggcgaccaatattgaccctaaatcgggcaagaccagtcttcagctgctacaagcggagaatgtgaaccttcgtcgggccaactccaagcaatcccaagaaatccagagaatgaagaatgaggccgaagcagccaaagtgtcgtatgcgacactggctgagtactacaacgatagcctcaagcagctgcacaaagcggagcttgagttggaacagctgaggaaataggaacccaagtcgtatgtagctttgaaaagatgttcacatgcccaacatatgtcttctgagacgcaagtgtgtccttatctttgtgcttagccttcctccgagactctttctacattgaatacaactatgtcttatgttttctctgcccttaggatttctaggatctaaaagtcaaccataaagctccatagataatccgtgattgagttaatttttgtactaggcagcttcccagtgagaactttattctgactgttgatcgatttcaactgtgatatcacatagaaagatcagagcgttgaacaaaacaaccatgttcctcattatacaaaactgtcgatacgagtgcaaatgcctcatattgggcaacatcacgaagtaacagcacggccagctggcccgacggcaaggcgcttaactactaatcaaaagattaaaggtgatccctacgtcggtcacctttttttggtttcctagcttatatgacccactagtcaacatacgtcatgcctgaatatgtatctcgtcatggcggattcgaggagacccgtcggtctatcaggccgaacagcctgtcaccggattgcctgttgctacgaagtaatagaagaagcccggaagtcagtatccccatacttcatcttcatccttcatgtttgatgcagcgcttaacaaagcaaaagtactaactccctcacagaattgagaatactgaaccgagatgtctgataaggataaagatatcaaaatccacacatgggatgggcccgatgaccccgagaatcccttcaattggagcttcagatacaaatgggtgataacgattaccgtttgcttcatgtaagaaatgccatctcaacacaaaatacataattttaagcatcaaaataacatcctcaccagctccatcctgacaggaatccccgcaggaagctacggctccggcaacgactggttgaagcaagaattcaatgtccaaaacacccccttcccaaacctctactgggccaccacttcctggaacatgggcgccgccttctggccactgattttcgtccctctgacagagtcctccggccgcatgccaggatacttcgtggcgtatatactcctcgtcatttcgctcttcccatccgcgttcgcaaagaacttcgcgacactcatcgtgactcggttcttcggtggaggtgcttcttccaccgcgattaatattgtcgggggaagtatctccgatgtgtggttcggtaacgaggctcgcagtctgcccatgtctatattcggatttacgagtgttgtcggtatttcacttggtccatttattggatcttctattgtgcagattcatagatcacacccatggcgttggtaagcacaacttgcatttccgaatatcaatttccaaaatcccatcatgctgaccacctcccacgtaggatcttctacatccaaattatctacaacgcagccttgatcccggtcttttggctaatactcaaagaaacccgcccagaagtgatccttaagaagcgcgcaaagaagatccgcaaagaaacaaacctccccatctacgcctcttccgaactagatgccccaagcaaactcaatctcttgagactctccttccaacgcccaacacacatgctcatagccgagccggtcgtgaccttcttcactttatggataagtttcgcctgggggatcctgttcctcttcttttccagcgtcgtgcaaacctactccacaaactacaactggggtacgatgtcaacaggcctgatacagctcgccatctcggtgggtgcggtcatcgggacagtcatcaacccgctgcaggactggattcatctccgctctgagcggcataataaagagaacccggggaaacctatccctgaggcgagactgtacacatctatcccgggtagtctgctatttgcggcgggtttgttctggtacggctgggctagtcagccgcatgttcattggatcgtgccgactatcggtgttacggcgacagggattgggatctattcgatttatatggctgttgttaattatttgactgatgcttatgagcgttatgcggcatcggctttgtcggctgcttcgcttgggaggaatacttttggtgcgttcttgccgcttgcttcgccgcagttgttctccaatctcgggtatggatgggcggggactttgcttgggtttattgggattgcgttgtctgtcgtgcctgttgttttggtttggaaaggcccggagattcggaggaggagcaagtttatgagggaggcgatgtgggagccttcgcagaggccgggctagattgatcgtgggaggtaaatatgtatagagtaaacacatgaatttattgttttattttgttcttatgtccatctaatggccattctctattgtaaaatgccaagagggtagtatagaaagacaagaaaccaaaagccacaacttcctccacatgttctatcaactctgaatccaaggtgaaaaggatagtggaagagggtatcggggcaaaggggtcaaggtcaggggggaatggccgtccacatggatgttgcttttgggaaatactttcgctatcaaacattcaaccacaacaagcacgaaaattttatttttcagcgcgcatggtgcggaagaaatccatgacactagtgtaaacaacaagcaaaataccaccaccagggccgagacgcaggaccttgggcgtgaagcccttgtacagagcagcgaagccctcctccttcatcacagtaccgagagcaggccaagcccagttgtacttggcgacctgaccggggaccttggaagtgttctggatgcgggacttaacaacatccattggggtgttgacgacagtaccgacgataccaccaatgctaccggcaatcaggtcgttgcgagtctgctggttcttgttgccgggctcgacggcgggcagctgagcgcggacctggaagatacagccgaagtaaccggcgttccacagaatgtggcgccacatggtcgactcaaggccgttgtacattgccagcgggccttctgcggccacgatctttctcacaacgtcgatcatgccgttgtacttgtgggcctgtgccttgtcctgaagacggatcttcaccagctcaaaaggaaccacgacaaaagcttcagtagctccggctgtggctccggtcagggtagccagtccttgggtctgcttgtccacaccgaacaggttgcggtagaaagcaccccagctgtcgttggcggcgaacttggtcgcacgcttcggcgcctccatcaggatgggcgcggaaataccacggtatagacgagaagcactttatacggtgtcgcatgttagagagagagccgtggctgcgtcgctggagtgatgacatacccctcgttcttgacaatcttacggaagcagtcgaacatgccattgtagtaatccgcaccgggaacagcgggtccagactgaagctgactgcaagaggatatcgttagcccgtgtcatataaagtccgtgtttattgcgaccggcggcttgcttacattcgagtcttgagcacgtccagagggtacctgcgagtcacatatcgtcaattgggtccaattttcacactgtaccaagcatatctccaacagaagcacttatgagaccaaggaaaggaagtggatagccgtacatgatcaggatctgctcgtgcggggagacatgttagtcaatagaacatctcttggggggggggggggggtccgacaggaggannnnnnnnnnnnnnnnnnnnnnnnnnnnnnnnnnnnnnnnnnnnnnnnnnnnnnnnnnnnnnnnnnnnnnnnnnnnnnnnnnnnnnnnnnnnnnnnnnnnnnnnnnnnnnnnnnnnnnnnnnnnnnnnnnnnnnnnnnnnnnnnnnnnnnnnnnnnnnnnnnnnnnnnnnnnnnnnnnnnnnnnnnnnnnnnnnnnnnnncgggggggggggggggggggttccgacatgacgaatcaagtcggtatcgtttttcaaagtagaagcaaaagatacatacctctgagacaccagccaccgcaccggcggcgaactggtagacgaaggggaggggcttctggggagtttcagacatgatggcggcttgagctgggatgtcagtacggggccttaattgggtaatattgggatcgaaaagtcatcgaaaaacacagctttgcgatcagatcacgacatatttactcacaagaccttaaagaacgagggctggagaaggaagaagtgagaagagatgaggttgccggtgtcggcgagaatcggtgatcgggtccgagtgcagcagccggtaagcctccgcctgtacgtttagcccgattactaaacccccgtggggagagcttctataaaattcacattccgaactgtttgcagctttattgtcataaattcatgtgcatcgtgtcttctcctgtcttttttataacatccaaaatcctacacacatccccagcgtcatccccaacatcattttgctaatacgatgcactacaccatctccgctagcagcagtcgcagtcgcctgttccttggtgacagttgtcgcagatgcggtgtctgttgcagtacagctagaaccacaagcgaaccccgtgggacagcatcctccacccacggtgtcggcacaacggaaccagccctgagcgcacaggttcccaccagaacgttccgttgttgtcgcgacgggcgctacaatcgtcacaccgtctgatgtcatagtcgtcgaagatgtggtcgggcatgatgtcgtatcgcagtctcgtccagtacggcagcagccaccttggtagacagcggagcaggcatagaaaccagtcgggcagacatcgctggttactgttgacaggttcgtaggccgtgctggtggtgccaagctttcgtctgttgtggatgtgccgctttgggaagaggttgtcgaggaagtcgaagtcgaagtcgaagtggaggttgaagtggaaattgaagtggaagtactatccggcttggtcgaataggtcacagtagacaacatcacggtcgaatgaagagtcaccgtaataacagtgatgtatgcgcctactcaaccaatcagcaaaaggttcatattcccaattcccatcaacaatctgggaatattcacttacatcctccttcaacacaatcatatcccgggatacaacacccaccccccaaagcctgcgaacaagccgtatacccactctcacacgacccaatagtcccagagcacgtctgccagctaggacagcagcccacatcgccgttccctgtatcagcaacaatctcgcacgtctccccggacccacagcagcgatcggatcgaccgatggatgtgcaccccaatgtcccagtcgggcacttgaaatctcgtttttcaaacaaattgtttgcgctattgttttctcggggaaggtactgactgtattcatctgtgctcggggagtaagatggcccgaatgggtatgattgggccacaaagcgcgctggtgaaaatccttcttcctcggagaagtgtcgctcagatatgttacttgacgaagaggcctctccaaaactccagtagtcgaggaagaatttctcgccttcgttctcgctcattttcttcacgccgagagctggtcctgatgcgagctgggatgctatagcggcattgcgctgtatgacgatttttgccggcagcgatcgcgtgttagtttctttggattctcgctccgcagagggatttgtattttctgctaagaccagtgttgcaaactgtggcagtgagcagaacacggcgagggcgtggaggagctgcatactgcctcttgggtatcgcgatcaggatcgatgtcgagtttgtttaggctgagaccagtgaaatcagtcgggttgaaggctaacttgcagttcgatagttgtctcaaatatgcgtttgtttcactaacaaaagtagtggatggcttggttgggaatgaaacttcgagttgagttgatgcgaatatatattctcctttaagattcaatttagttgaattcgacagatttaatgaaagaggctttgtcggactaggaataattaagggcgcattgggctttctataaagctgcatataaaggtggctgggaatgcacaccgctacgcattagcttgcagaacagacatgtcaagatgtggagtacaacaacaagtcagtggaaacttttttattggctgatttcggcattgaagattattctctgtcttggtcgacgtggtacgatatcaagagacagactacttccacctaaccaaataagaattatttaacaccgacttcaaaggtgctcatatcatttgcaaaatcaaagactaaatgctagcagcacaccacagagtatggcagggtatcgtcagtaaatgacatgacatgggaggctctcgcacaggaaacacgccaaaaggtatcaacggaaatgaaagaaacaaaactaaggcctcaatgcaatgtcgaatgcagcaaacaaaaacaaaagcaaaaacaaatacgtatggaaccaatttcacttgcacttagcaataaatgattcgacatgaaagctcactgggtcggggatgatcagaccgaggttgcgtacaatacgggatcaagtagagggatgttcggggtcagctttgtcttcctcctcaggcgctgtagggagtggcttgtccgtgtcagaagatggagacttgggctcttctgcctcctctgcctcatctccatcctccggtttcgcctcatttccaccttcttcttggtcgtcatcgcctccgccctcgttgttttgctcagctgcctgctcagctgcctgcacagcagcggcctctgcttctgccttctccatctcggcattgcgggcttgctgtcgatcccaaacttctttacggatgcggtcgtcttttgcagtacgaaggcgctcagtctcctcgaagccaccgctcttcttcaatttgccttcgtcgacaaatgcaccaagttccttctggaaaagaccgattcgccgagtctcaagttccttctttcgtgctttctccgctcgctcaatggcctcgagtcggctttcgtggtttggttgcaaagcacgaacttcacccaggacaccatccttggctttcatgggatcaacagttgggtcaattccaagactcctggatggggcgcggacagcggtgctaccggttgcatttgtcaagacctgctccttggtagcttgctccaccagggcaaaggtctgagtcgccttctcgagatcatcttgcaagtcggcggcgagatcttcctgcatggtaagctggtctcgttcttcgcaaaccagttgtagctccttttcccagatcttggtccagacgggcttctcgcgagccaggaagtcctgcattttcttgatttctttcatcaccaagctaatgtcacggccgacaccttccaattgtcttggaagaggacgaacaccgcgggtcacaacatcctttcgaagatcctcaaccaaatcttggaggtcatcgacgcgagcgaccagccgctccgattcaccggcaagttctttcttaccagtgttgacgcgagcacgcccagcatcaccttcataagtgggagtggaaatgtcactagcaacggtcttgaccttgcttgccttggcacggactgcgctcatagaaccggtaatatcggatgtaaagttagagtaggtctgacgcaggacagccaaatcacgacgcaagctctgaagctcggcgatttgagttccgctacccacaatcgatgccttggaattccctccaacggcagccaggctagaggttgctggtggagcagcagacaaacgagcaatttctttggctgcttcaagctgacgatctgaaacccgctggatgatatttccttggccagcaagcgtctctttaacaccttcgaccaggaggcgtacgcttccgaggccgtcgtcgaaatgtttctttacctcatcgagattgtcaacattaagcactaacacagaccgatctttgacatcggtaagatcttctagttcatgtcggatgcctgaaattgggtcttggatataaatttctggcaaatcaacgccattgtcgtgggtattccaggcaaatttttcaataaaagcaagctgcagacgcccaatggtgagctctgcaatgccatcagggagcacatacttcttaattttgcttttatattgtaggaacagcgtcagctctttgcccggcgaaggttgctcagtagcaaattgaatagctgataacggtgttgcgatctcggacagttcaaaggtgtcctccttcggggtttgcggtgctggttttgcggactcaaaagcctcttccaaggttggcttctcctggggtagggggagaatcgaaggaggaacaatggtagattccacagtatcatctttcaccttatgagcatccggttcatttggcacctcgagtggtgtgttgtcgatctcttgtggctcaaatggaggcgcaggtggaggagtgcgttcttcttccacgacattcggaatatttgcgggtggaggagcttgcgcaaccttagcgacttcctgtaaacgattgttggatcgttgtcgtgtatgagtaaatgaacctcgcagacggactgcgttcaaggattcgcggacatcacgaccgcgattgggaataggagagttctgagtaggcaggacaggaacaccatttgtagatgtacctaaatgtttctggatctgataagcggagaatcgacgcgaggcacgtcgctcaagctctccacttctctgcaaagcccccaatgcgtcatcctccttcggcgggggtggaggtggaggcgcagaaaacccggtgggtgtaatatatgaaggtgcagtggtgttcgatgtgttggctcgaggggttgtatcattatcgaagggcgtgggttgagacagcatttgctgggcctctcgtcgcgatagttctctttcggcgtagttcgtcgtccgcggttcggttatcgaaggtgccgaggatgttcgagcaatggacggtggatcctccagcgatccgctgccataccgtctgtttgatcgtctgggagacgactgggatgttgacggcatggtggatgctgcagcttcatcatacagttgacctatgggctgcccactagcgatgcttcctgcactggcttgccgtcctggtgcggagcggccatcttcgcgctggtgccgggaccttaagcgagcttgcttcttcttcagcccttttaacaagttgatgattatatctcgaattctgggaaggtatctatcgaggctctgggaagatgcatcttgactaagagtgtcttcaagtatggtgcgcagcaggtctggtacgggaccgaggtctgaagtgtcgactccgatggcactgaaggcgcgacaggccaaattaaattcatagcccaatcgaacgtatacatctgacacgtcgttctccgatgcttgctttcgagaccattgggttaaggtttcgaggagttgttttgtcgcaaccaagaggtgcgtcacgctcttttcgatttgggatatttgcttatcgggctgtgcggtggggggaaacaccagttcattagccaccgtactgtaggcaattaacaggccgccatagtcatacctgagtcttgctagactgagatcgcgccgaggcggaggaactgcggccggactgctgggaagccatggatgtgtcggcactgccagaccccgagggtcgctcgggggatgcttgttgaaccaactgttcgggataagggaactgggctcttgacacgtctgaggactgcatgagtatgataggccaaatttccgagggagtgagaatagaaagtgagaaatagggcagaagcgagtgagagtgccaagcatgtgtgaagatgatgcccagcctcctgtcaacttggggccttaccgcacgcgaaccgatgatcagtaacggttcaaccccccaataccataaatactatatattactgtatagccctgtaatgatgtacaagggaccggacaacgcgttacccgcctattcaggccacagtaggtagttttatgtagctagtacatatatggactcgtgctattgatccttgacaattgcgaattggcctccaatttgatgccatcaaatcacatgcttatgctacctgcattttaagaatcaaaatacatcgaacatctacaaatacaacaaaacatcatccctcaccgcatccactgataagtacccgattgataagacccttgcctttgtccttcagctccactctggctctatttatattcctgcatgttgtacggagacacttatttgtgttgtaggatgatgggccaagtcatttgatcgtattcctacatcattatttagatctcctgtgtaggactcactgctttcttttccataggagcatgaatatcaaaccaagtatggtacctgctaaccctaatatggcagcccaaccaacttaacgcctaactccatcccagccacagaagtaaagtagacttcgacaataactaggttagaactgaagactggaacctaaggggaaaatgatcattcctgaagataggtgtttacctgatttaccaagtccaaaggggctaatcaacgttcgaatccaacggaggcacgaacagacattgggccatagccacttgatgagttttcttcaaacaactttaacaaatatagatcagcgatctaagctgtgcggcttccactatcccggtgatccgagacaggaactactacttcagacgctaacgatgttggctccgaatggtgagaataaactggaggccgcaaccctatattgtatgcaggtacctacctaggtatgtaactagagccccagttgattacatgcataagataaattcaacacctaactagttagttagttaactaactaggcacatggcgaaatataataatcttaatttgcggtagcggtacgatatatattcgacctaactaggtagcgggcctagctctgaccgttataaaatggcagctaagacaggaaagccccacccgacagtggaagttcccatggaaccaaatatgtatcgtgactctggacctatgacctcaggtatgacatctggagctagtcgacggatggtatatgtgtatatatagttactctactaggaagtgtaactgaagcaagatacgaagttgcataatacctagtatggacatatgtacggagtatgtatgtgttgttatttcaactatgacacaagacctcgggacgtaattgaccaacaatgcagttgatcgcgtaagatgatgcatacatcagtacatttggtacttccactactccatagctgctttatgcatcggaagtaaataaatcttaatggattcatgggttctgaccctagatcgcacaatgccatctttctacctttaaactctatggacatgggagctacctcagcctgacccgtactctgtcagtaacattggcaattggccgatcctagttggaggcccaatagcacagaatacttagaataacaataccgattgtccatttgacaatatccattgggacatgaagtcaccaagccagggaaaaataaaaataaaaataaaaagggtgtaacacacaaatacaataccatacgcgtgacttctctccagaatccctttcttcccctatcaacttgcaacaagcccatttctctttcttctatttctctgtctttctttcctttcccttccattccccttttttcatcctcctgccattggcattccggtatctccgcagtgtggtggttgcttatccttccccctcactttccccccagtcctatttgtgcaggcggtgtgttgtggcatcgtgcctcatcctagcggctttccgccgagcgaagttccacgacgcaagcttgccctgactgacatcaaagtcaatcaatggcctccgctcttaactctgtgccggctaatcacgcgtctggcaatgccagcgcgggtgcccctagcaccggtcgatctaccctgagatccagtaacagcacgaaggggtctgacaaccgacgacagtcaggcagccccgtcgatggcggacaacggtatgatcagcccttccttctacacaaatgtcaaatcaaatcctcgtgtaattccatatcctctcggacttgggaaactcccctttgttattatcctacccttcccttgtccggctggcgattgagctggtgagctctgttgcatgcctgcttcgagttgtgcgccagcaagagccaattgaagctgtcggattcgatggcagaattgttttgtcgttctctgcttcgtgaccagtggccactaacgcaagcatgttctactgcataggcgcacaaactcccacaaggcctggacccaagggaccaaccccatcactcaacgatcctcatacactccatcgaacggcaacatggcccaccagaaacagtctgggtccccgagacccaaccagaaggagtcaaacactcctgataaccatgcccatgaccgcctggtcttcttattcgccagcttcattgtaagcctagtcgcgccaccatacccgttgatcaattctaacctgctacctagggtctacacaccaccattaccaccaaatccggagacaagtttaccggtatcttctcttcgtcgaccatggagcctaccgaactttcgttcctgctcaagatggtccagcgaacctcgcaagaggcccaaccccgggcaaacggcgtcagcgatgtcgcaactccgtacataggctccgcgcccgagcacatcatgtcattcgatatcaaggatatcgccgacattgccgttccaaacgttaccacagccgaagtttcagccaaggaaccaaatggtacgggttgctttttttaatcggattagtctgtgcatatactaacctagtccacaggtgcttcccagggtttcagaactgacagtgatatctctggaaacttagccatgcgagagcggaccctgcagcgctgggaacctgccgagactgacgttgatatgtcactcgaaacaagtaacacttctgcgggatgggaccagttcgaggcaaacgagcgtcttttcggcaccaagaccaactacgatgagaacatctacaccactcgcctcgaccgttcggatcccaattacaaacagaagcaagcggaggcagcccggatcgctcgtgagatcgagggacaagatgtggacaactcccacatgcgcgaggagcgtggccttgtagcaccggatactggcgaccaagacgaagaagacaagtacagtggtgttcgacgcgaagacaaaaccttccctcccctgctttccggtcagccaaacaagtacatgcctcccggacgccgccaggcagctccccagcctgctgcgacgcccactgcacccaccaaacagcctgttgcttcccctatccccatcccatctccggccgtggccaagggagttgtaccttcacaccagcaagctgagccggtcgcatcgctgcagcccacagcagatatcgagcgaaagagtacctcgggcaagggcgtcattcccgcagtacctactgtatccgcagtatcagctggaaagcggcctgcacctgaaaatgcgactgcaaacgtggaggtagaggtgctggatcatttccgacagttcgcgaatagtgagaaaatgaagatgcaggagcgccgtcgcaaccaagcctcatatgaccgaaccatgaaactcaacgagctgctgaagttttccaagagtttcaaactttcgactccggtgccgaaagaccttgttcccatcctggccaaggaccggcaaaagcaggaagcaatcatgcaacgagggctgcaacagggggatgataaggcgataccgaaggtcactacacctcccacagaacagctacctgttcgtgccggacctagtggatctgtacccccatctgcaccagctgatcgtcaaaactacaaccgcacccgtcagggttatccgcccactgggcctcttgctggtgggagattccctcagcaagtagttccgcccggacgtcctggtgttggcatgctcagccatcgtctagcggacaatctgcagcaacgaaagggcgcgggaatggggcctgtccccactcctcttcccattcaagatgctcgtggaacacccactggtcctgccagcgaccagcagagaatcaccagccctgtcaagtcacaggccgggtcttccgcggcaaccaagttcaatgtcaaagctatggagttcaagccaaaccccgcagcgagcacttttacgcccggttcctcgggcgctgctgcaagcccacggtctttctctcgcaaccgctctgtgtcacgcgccacaacgccaactgcgttcttcggcccaaggaagccactgcctgtctctgaacgaccctcgatcagtgatcagttcaatcccatcaagcgcatgaagaaggagaacgcagagactactgaaaggttgattgtgttgaatggaggtattccaccaccctacaagactttgccaacttgggacatcgcggatggcagcgaagataagacgtacgatcagatgttcaaacagcctgttggcgtgccgacagtatcgcctcagggtcggtccgcctcccacaacaccaatattccccagcagcatcagctgcccttccacttccagcaaggtaacccagccatgccgccatcttctggtcctacgaatggaccccatggtcttcactctcagggcccccatggcccctcccatgtggatgatcatcaccgcatgcagttgtccgcctctaactcccaggttttcccgtccccgcggatgcaacatggatatccgtcccctatggcttcccatgcccagctttctttcgcacaaccggtccctcagttttacggtggcccccaacccggtcacatgagacctttccagggtggtgggcctcagtttgtgaatggcgctcctatgatggtgcagcaggtctcaaatggaccctacatgggagtcccgcagggcatgactccgtataacgcacagatgcccatgtactccccgaacccgggccacgcctacccccaacatacacctcaaccgcatagcgggtacccaagcccgagccgtggtgcaccgatgatgatgcaccagaactcgcaatccggacagcctcctcaatcactaatgtttatgcctggccaacccggatatccccagcagtccggacatagtgagtgtggctacagtcccccatcaagcaactccagtttttaaccaacccagtgcctcccaaccgtggcaactacccacagcagcctcacttttcctcaagccctcatcaaccgcatcatttcccacctaaccagcaccggacacccagcaatggcttcaaccaaatgcctcaattgccaccccaaatgtctgccaataccccagccacaacccctggagcttcccatccggccgaggcaacggatgaaggaaaatgaactacacgaatcatgaagccgtgagcggccccctcaaatgatgctacatcttattgcttagctgtgacttgtccgtgctctgcattatcggcaaccgccaaataccccggttactcttccatgaccgatcctcatctgttttccccgtcatcgacgcggtcttcaaaacatttgaattctgcggtgaacttcatgtggtctcaagacttgctcggtgagtgaacagtttcgtagtcttgagaacatgcgagcaacacccgctaaccacgtgatcagacatgacagatcaatctactagttgtgcctatctattttccagatatcgatctggtggtgtacatggaacgaatttctaggcgatgaacccgttgaaatcgatcacttgatatccgacctagctcatcgttgtatgcctactagtgcacaacatctccacatacgtcatcgtcgagttgaagtcttgagggtttctccatacctgagatggcctcttccttctgattctctcttatccagtttctttttttttcgtttatctcttctcttgctttcttctcggttgttggttggagggctgtgtgtccccttggtgggctcactggcctttctacctttgatggagggaagtgaggtctgcggtgggttgcgttacggcatggagacaatgcttggtcggatggtgatgtgggtgaaggtgatcggtctgggcgagcaagcggagcagtgagacgtggttgaagatgtgggaacttgataatagagatagctcgacccatggccaactggcaatgaaatggttatctcatgaaaatttctccatcattctgtgtagtcggccgctcatgcggtcgtgtcatgtctgtttcagatattctattcctcttctcggttttatagctggacggcaagcaaaggagaaaaaaagatgtgcagacaattctctatactatattataaattttgaccaaataaaactccccaatatcaccacccgtatccatattcaacatacaaaccaaatatcgggaattctagataactgttacagatgtcagcagctgcaaatgacctcatttcaaataaaaaagtagtcaagtacaggggaaaaagtctcctcaggcttaatttcaacagtgtcatcatccaagccacagacaccagacatcaacccaccgcggtgctttatcccattgcaagctcctctgaccacactctaggcataaacaagcctcagaacaaaccccctaaaccccaccaagcatcacaaaaaccaaccacgtccagcccacaccccaactaacacacctctccgtctcccaacttccaaacccccacagcaacatgcccacaccactctccacagcagatgaaaaagagaaaaggaagaagagagagaaagagtagccaggaatgacaattcctaggcaatcagagagaagactatagagatgtccgtatcccgcaaagccaacagaacgccgccagcaagaacacgtccaaccccaagccctcgcaaagaacaccataagaatgccatccagccacccaagtcccctcttccccctaatcccgaaaccctcgcaccctttacgccacagccattggtcgcccacccgtcctcatggaagcgaagcggacacggcaaccccagatagcggcgccacctccccgtttcccgcactttctcgcactaaagacccgacaccgtacacgctatcaccctaaccctaggatatgatcccaaggcggacctcaacaatgcaatactgctatatgcaatgatattacagtaattgaaagcgagatctcggcaatgagcgcgcaggcgccaagcccagctgcggccatgcctcgggacggacggaaatgtaaatgtacacaatgtctcccatgatccaggaccaacgccgctttgtccgacgtggccgcgagccatgggggtgctggctaggatctcgatgctgctttccagcaatccgacgggagacgtaagcgttctgctggaagagtggggggaatggtgttatgtgaagttggttatcgagagtgtgatcggaggagggtgtcgtcgtggtctgggcacagctctatggtggtgtggcaccatcatggctggtccaacagacagtagtctgctggaaagagatagttgattcgtgcgcacgaggtggtagctcttgaggtttgctcctagccggtttgtggtattgcgtgggttttagaacttgcgggagtaccatcggttttgctgggtgagtcttcttttgcggtgttgtggtcatggtctgaccttttaccagagttcgcatcattggagagggcgacttgcgtcgctggttggtgtactttgtgtacatgcatgggaaagggactggaaaacttactgtttgatcattagggttgtgtcgactggtatataggtaaatgtggaagaagaagataagtgctgtagcataagccgcgtaagttccagtgtcatttggcgacagaattagacgcgtgggacagtggcatggaggtgaagaaaaagaagacaaagcggagctttatttatatgagcacgtgttggcctcagacaacggtgtttatcacgataagggctatcagtcacgtgatttgggtgggtctccgataaggcgggggtgaaaggagtgtgttgtttgatctgccttgctatctgagttacaagcacactgtatctgatcttcgatcattttcagtcactatctcgacctattgatctaatcctgacagccgactgaatattgaacctttggccattggccgccccgactcgcgcaccccggacaccccaaataaaccccgacctgctacatcggtcacataacagccatggatttcctgaagtcagctatcggatctgccatcgcgaagggcggaggactcccattctccctcggtgacagagttgacatcggtgattcggtctgggcactgcacaacggtacgaaacgggtacggtggctttttggttccttcttccatgcgggacgagcttcaatggctgacgatgtcgtggaacatataggatgacggttctgcgtgcagtgtcttcgcatttgatgttaatgcgaataagtcgcgccttcctcttgcgaaaaatgcagtgcgcaagtctagaaccttgcggcatcctggtgttatcaaggttttggatacgattgaggtatacttggctcccggccctttggtatgaatatgagattatggcgcagacgcttacgacttgacagacggagcacaatctttatattgtcacggaacgagtcgtgccactcagctggccggtgaagcggaggagcttgagtgaggagacggctaagtggggtttgtatactgtggcggtacgctattcttgagagtttgatatcatagcattgctaatgaggatttctctggacagtctactctcaaattcatcaatgaggatgcttcctcagttcacggcgccgtgcgcgcatcctcggtgttcataagcgagagcggcgaatggaagctaggaggttttgaaatcctgagctctatgaaggaggacgatgcgattatatatgtgagttattctggctcaggtttatccagaaagtgcccggttgatgccaaatactgactctatgcatagacgtacggaagtagtgtacccgatgccggtcgatacacgccaccggaagttgtcaaaacaggctgggatactatcaagcgcaaccctttgacagcagttgatgcctacgggttaggcatcttgatcttcgaggttttcaatgggggtttctcaggcagcgaccaagctggcaagacgacgaacattccccccagcatgcagcaaagctataaacgtctttgcaccaccaacccgaaactacgactaagcccggggcacttcgtggaccagggaatgaagcagggtggattcttccagacaccactcattcgaatgactgaagatatcgacagcttggggctcaaaagtgacgccgaacgtgaagaatttattaagtacgtatattctcaacatgctgcatataattatttcttggctgacatatcacgacttgcagtgagcttgataatctttctggggacgactttcctgaagaattcttcaagatgaaggtgctcccagagctactgaagtccgtcgagtttggtggtggtgggcctaaagttcttgtagctaccatgaagattggagcaaagctgtcggcagaggaatttaacgccaagttgactcctgttattgtccgcttatttggcaatcccgatcgagcattgcgcgtctgcctcttggataacctgccatcaatgatcgataatcttccccagagggttgtcaacgataagatcttccctcaaatggtaagctataagattttgggtaatgcacggtttactaacatgccatagacttctggtttcaccgatgttgctccggtggttcgagaacagacagtgaaggctgttctgactatcatcaacaaactcaatgataggattgtcaatggtgaactcttgaagttcctcgcccgcactgctaatgatgagcaacctggcatccgtacaaacactacaatctgtcttggtcggattgctaagaacttaagccaaagcgtaagtgatttatcattaatgttggatcatgtcgctgacattacatatagactcgctctaaggtgctgattgcagcattcacgagagccatcagagacccctttgtccatgctcgaaatgcaggacttttggctctgtccgcgactattgatgtatttagcgaggaagattgtgctgttaggattctacctgccatttgccctgggcttttggacaaggaaaagtgagtaatgcgctcggtccctaactaatggatagccctatacttacagttgaaaagattgattcgcgaccaagcaaacaagacgtttgatttgtatgtccaacggacacggaaatatgccagcacgatgccagataccgtgatcccccccgccgcacctgcagaagtcaacaaacccgatgcgcgtgttggcacacccaatgataactcctgggccggctgggctatttcttcattcacaaacaaaatcgcagctgctcacggcgagattgaacccaccgccagcgctagcaagcctgttgattccgatactgctcgctcggcgtcggttcctcgtcctgctaaaccatcaccctcaccctcaaccccgctcgaaccacgaaaacaagcactccgtcccacagctcagtccatgaaccggtcaatgtcagatcgcccagccccggtggtccacgacgagccagaagaagaaggcgatgatgtcttcgatgcttggggtgctatggacgacgacgaaaaagacgacgatccattcactgccgctgtagcttctcccaaccccagttctcccgtcccgtcatcgacaaaagccccagcggtgccctacgatgatggcggcgaacccgattttgccggctggctggctgcgaagtcacaaaccaaagcaaaaaatcctttgccaaagggcctagccaaggccgcttctaccaatgccgttaccacacggtcgacgataagcaacgccaagtctcggaatgtggtttcacataagaagattgatactaaacccaaagatgaggagggcgatgattggggagatgcatgggagtaatcgggaaacacctcgctctccttttttgattttccatgtccaatcccgtctaatgaaagtctagcgtgtcaatatcccataacctttgcatcgaggcgtgatcgttatatttgaactcaaactcagacaaaagatgtcctaaagatgacgctcatttgctaaaattgacgttggaatgtaactagcacttaacagagccaaccaagtctcaaaacagagtgtcaaatataaaattcgacttccaccagggaaagctccttaatgaaaaatccccgttcaccaagtcttcagtatctccccagcaacccgttctcccgagctaatagccccatccatatacccaatccacctcagtgaagtctctgtcccggcaaaatggatcctcccaactggagtacgtaaataagacccatactgtgtcaaaactcccggcggcatgaaagcactggggccaccacgggaaaactcctcaagatcccacctctgaacgaggatatcggtggcattttcaacgcgcggaccaaagagattagcaaaactctgcttgacttgacgctttacctcctcctcgctcgcagtatccagcttgcgcatctcgtccgcctcgatgaaccccattattgctccgaacgagtcatccgccggcgagttgtcgtatgtcactcggattgccccgatgtcgctcacaccttctccgttgagtccctcatcccgccaccaggctgtcgggaagatcgcgatggctttgccaagtgcccccatgggcatgcgctggtttaactgatctcgtccggctggtagtaggggatcgaatatgatgtggcttgctagaggtggggacatggcgacgacaacatgtcgggctgaaatattgacctcatctgaagagactagatagcgggattttttgagctggactttgcgcacgggcgtgttcaggtagatgttttgcgagccgagtctctcggcgagaagtgttgcgagtaactgtgttccaccactcacccgactatcctgtgcacccccctccaccccaatgagacggttgatggtcccaggccctgttttatctccagcggcagctatacaccacaatgcatacagcaaagacggttctctcagttcggtcgacagtatagctgggatggcaatatcgaggagaacgcgagagtcggcagtggataatcgggaactgacgtatgtttctagagtcattgaatccagcgccgtggcattcggggtattccatggtgcttctaggtcgaccttgctcgctagggtattgatgtcgttcatgaagaatgcaagttcaataagggagcctattcccacgggaggaataccgcccaaagtatcttgataatggtgaaccgtgttgtttcgatagaaggttgaatttcccgtcgtatatgtcttataggttgggaggccgagttcggccgcgagagccaaaacgcggttttgtgttggtccaacatattcgccgcctagttcttggatattctttcctgtgaggttgaagttgagtacgcgaccaccaactcggtctcgtgcttctaatatgacgaaggatttgttggccgctgccaggtctttggcggtggagagtccggataggccaccgccgatgatggcgacgtccactttggggatgaagcattctgcaaccagtacatggcaaaggggaattgctatcacgaagaggtgcattgcactgaaggatgacctgcagtaaattatccgcataattatccgtgtatctgatcgatggactgtttgaagtattactgagctatagcggttttttatatgtagggatttcaacggatggattcgatttatatttgctcattttaccaccgactactacccaaggttacaaagtacaacagaggtaatgaagccgatttgctcggcctagaagcaatgttttgtgattagagtagcacgagcgacagaagagcgcagagcagagtatagccctgtaggtgtagctattcaaacaacataaatgccagtaaaccttccaatatctccctattacgttattgttgctggcatggatattttgtattcttcttccgaaatcacatagcgaacaacatgatagcgacacacaaaaggaacagttgatgtctggcgctatatctccgtctccgagccttcttccgaggattcgcaggattcgtcttctgatgccgatgaggaggattcattacttgttattccactcgattcttctggggtttgttcgctagacgaacatcatcatgggtcgatggggatggcgttagtatcactgttactcgtccccttgctcttagctaacgtctatattaggtctgttcgaaagcgatcaggaccttgacgtggtcatcgacttgaccgacagtctaggtatcaatattgaccactgggaacacaacctagctgcaatggttcatcaaacagacattctggcaccagcaaggtcaattgccctctacagtacccctggatataccgatttgctagccaatgtcatcgtcccgtacttccgccagcagctcgacagtgacaaccttggagaacggctgttcgctgccagtcgcgccaaggaagcagacacgggcgacctctcccaagacgccaagtaccgaactatcattctaggtgctgtcatgatccgagctggtgctcgcatcaacgaagcggatctgcagcatctacgtgacctagtgccccaaattaacttcgactcgcgccaaatactttttgaataccatgggttcagaactccaggaaaagttcagtttctggctgccctggatcactaccagcccgtgttgcacgcagcttccaggagcctaggtgaattccctttggaagactttggattcagacccttcatgctaacgtaacgaccctaatagctgcttcacgtgtggaaaaatcgaggaggatatcggtcacgagcttcagcaatgcaagatatgcaaagttgcgacgtactgcagcgaggcaagtaggatacaagctatctttctaagttgtatgttcatatatattgaagcttcataggactgtcagcgtggccagtggcacaagcaccaagtgagctgcttttccttgagccaacgccggataataaacgtctgatcgcaccttttgatggactccaagaatactggggtaaatattctgatgtttctagttctcttgtgctagggtggattattacctgcatgtctgcaatatcagggatccaacattgcttgacatatcgatcggtgaggattgatattctcttctagcgattgattcggtcaatggaagttcaaattcaatttacgctctggagtcgtcctgctagaaaatatgcgccagcacgctacaaatgtagtagatgcatgccgtggaaaggagatagacctaataatatagacgcaaaggtcaatattagttggttcgtacaatttcttgctgtcctcgtacactccactttctctcggaaatcagatatctgcataagaattatgcacatccacttatgccgattatgcagcggcaccctcactccgccgatcccgtctttccacgacatcaaagcatcacacccgatgtcttccaatgagaagaaacgcctccgagatcgtcgctcgcaacagaatctccgcgaaaagaagctgcgacatgtagcccaactcgaaaaacaggtgatacactgcgagcagcatcacagcgaccaaggcgtgcagcgccttctccaagtaatcgaagggctccgcaagcaaaacgaaactcttctcaagcgccaaaagagcttgaaatcactcgtcaactcctgggagacagaactggatgagccagctgccaccggtgattccagccatgacttgtcatctctgtataaggagctgagcaaccgagaagcccgattctcccttcaaacggatttcaacgaatcgataccccagcacgggattagcagccttctaaacgctcccctgcccgctgtgtcaacatcaccgcaaatccgatccccatctctagaacctctttccgccgaaaccacgcctccgtggaaccaaatcccaccacacactgatgacttcagcacacgcaccatgatctcctgtccgtggttcatctacccagagctgataatcccatgcccagatatccccagttcccctcttgactttctgtacggcacgaaaacaaacccgctagcagatatgatccacacggccctgcaacgccgcccagtccgtgatccggagcgactgagtactggctggctgacttaccacttctcgagatgggtcatttcccccagcccggagacttatggtcgactccctgtgttccttaggcctgtgcagggtcaaatgaccgttccgcatccgctcgttttagatttcttgccgtggccaaggataaggctgaacctaattcggcgttggcatctgtatagtaaggatcgggatgacctgttcgggttcatggcttgttgtgttaagattcgatggccttggaatgagacgattcttgaacggaatgaacagaacgagttgtgtattaaaaaggcgttttatgagatgttcatgactgaaagtgggtgggggcttacgccggactttattagacggtatcctgatcttgtggaggggatggatatcaatcaaattgtgattgaacttttctaaggaatgaccctgttcatgtacagaaattcatgttctattatgctctattctattaattgtgtataggcaacttctatatgtgggtcgttaaacatcatcccgatcatgggaacagacaaggccgatgtggagcgaatagtatgcccttgatagtagcagctcaatccttttcaatctttaccatcgagatcaataggccacttctcccgaatcaccttgccatacttgatgaagacaatagggactgggatgaatgccaatgccaggaacccaagcaacgagttcccccacccaagacccagattaccgaacatcttcggcccagcaagcgggagcagagctccaaccagggagcgagtcgccgtcaaagtggcattggcggacgctgcatatttgggatagcaatcgatgatatatgtctggataggcatatacacgcccatcgtgccgactccgaaggggaacatgccaatgataggcacgatccaaaatacgtgcttgtcggctgtccagccgtaccagaagaagctgattggaaggatgcaggcgaagataatcatcattgggagacgcatctcgggttcgaacttgccgccgttctttgctgtagctgacatgaccatgcggtcgtttgtgaaggcgataattgcgaggccaccgataaaaccgaagccaatgccgagatatgcaagtcccgataggccaacggagaacccgtatttctgagtgaagacgctggggatggtagtgaagaagaggtagagaaggccgtaaacgaaggactagagatgaaatgttagtaattcgcatttcgtctatcacgaccgaacttggactcaccatataaagacacagaaggaacacaattggcgacttgacaaacagcaaaaccggcctcttgaaactctgcaccatggtctgtcccaaagtaacgggctccttatttgtgtcataagcactccgcaaatccattcggcccgtctccttcacgagtttctcggtcttccagcggataagaacttcggcatatgtctctttgttcagaaactcaacccccaatgacacgataccacccacaataagcaatagccaaaacacccagcgccagccagcttcctgtccgaggaatccacccgcgataggcccgaccacaggtccaatcagtggtcccatagcccagacggcggttgccatgccgcgttgctcccgggggaacatatctgcgatcacacccgcaccgagtgttagacaacccgagcctccgattccggcgaatagacggcagacgatgagggtctcgatgctgtttgctcgtgcgcagccgatttgccagaccacaaaaaaccaatttgcagcactgaggacgacgcggcggccgtagacttcgctcataggggcgagtagaaggggaccgaactagttccgacatgttaagacgggttggattgcataacttatagggtgggatgggctcactgcatatccgaggatatagatgctgacactaaaagacaagattgtctcatttgtttctccgaactccgctgccacgtatgagatggcgggtgagaacatgctcgaggccagcggagagatcagagtcatggcactgatcagggcgagcaaggtccattttttgttggccgggaagttttgggggttattaaggtcatcttgtccgtcccagcctactattccgcagctgaggtctgtttctgggaatatttctgtggttggtgctgatgtttcggtggtttgcctcgttggctgtttttcgaggtcatgtgttaggtttctgacgctgtctccttcgttcagggttggttggtttgaactggactctttttgaagagtatgcatcatgaatcacaagtgtctgtggaataatgtacaagagaggacgtgcttggcatgtgagagtatagagcagtatagtggaaaaagggaagaaccgatcaggtataaaagcaaaagccccaagacgatagatcaggctattatcagcgcgccagttttatccgatatatccaccgagatatacttcattgctgccttatattgagtcataaatgccattatgcttataaaagggattcataaatcgacaagcatcgcgcaatgcaacgagtatggacaatgtgatggcttagcgatgattcagtgctccacttctattgttcattgaccaataaacgctcttcagaatagccaatctccaggcgctgaatcattgtttggtgcctagtggggccactctcctctcgcatagaacctcacgtttatttttatcttcttgatcttttaatgcgcataattcattcggctcaggaggttgataacttgcgatttaattggtaaaatacaaggatttgatagcatgtgtctcatctcggacccctgtttgaaatagcctttggaacacagcctccatatcatgttcattgttccttctcggcgtcttcgaacacacttcatatcattttcacggcggaatcaagcacttctttgcaggacaagtaggcaccccacaataaaaggtagccatgtgttgccatactcttgtgcactgtcgggcttccatcgttcatcacatcatcattcaataggcatcggatccatacactccaggtagtccaacacatcgaggtacacttcttcaaggtaagctttggtaacatcctgggcgaagttgtgcatgttcttcaaccgttcatatctcagattgacaaaggctgttcccacatcactctcaacttccgccagcaagatcagcagcgggacaaatggcggaatccccatcttcatattcaaagtgtgggtgtaatactccatcagacggtgaacaaaccaccgggcactagagtaatcacatcgccggcaccgaatgagattgaacagaccgcttgagatatcctcatagtcctgtgcgggactgcgggtataaggcccaagaatcttctcggcccccatcatgaactcgtctgccagttcggctcggggctgttctttcgcaatcatgcatacaaggatcggattcatgttccacgctagccagttgcggacctcgatcgacatctgttgccatctcctagcattgggcgagtccctgtaagggcgaacgatgccagaatcaatgagccgatgaagtctgtgcactttcagaatgtggtagatgtcattgcgccaggtgaggtagtcggaagggtgtttcagaggacagggaaattggtacagcgtaaagcaagcgatttctggcagctcaaatgcctggtcggttggtccagtctgtttctcaaccagaagtagagtcgaccaatcgcgagtgtgctccgtcgacatcttggcgtatggttgtaaagatctttgtcgaccgggtgccccgttgttgtaaagtgagaggagaccccgtctggaactatacacaaacccaccatgttagctcatatttttttttcgaaatccttacaataaagactgaaggcttactgtattgatcaattgagtaaaatatctgactatgccacgggggcgtgtgttggtgatctgcacacctctcgctgtctttcagtcgatagccgagaatcagaggataacagatttcccacaattgagacgactaaggagccctgtagaccgagagaatctttcaaatgctgagatactgacagttgtatctgtctgtatgtttattaaaaggaattgagtcgaacagaagagaagtgaagggaggagaggatgaaagtcatgaagggtctgagtatgggacccagaatatactctcacttacgagcaatcccacatgagacatagtttacgcgggtacctccgagggcactacgtacatttaatccaagaataaatctactgtcactagcagtggacttgaagcagtattttcaaacgaagcagcatttcagccatgtatggccgatgagcatgtctataagtgaattgtatagttcctcggcctcaaccaggaccaccaacaccctgctctttcggtgtgaatatagttgtgttgatagtcctcttaatataagttctttcaatcttgaaagcatatgtattccgacaggaagtttgcatatgtccacgcagaaggttgttggcaatcgataggccttatcgttatcgtccccgccaatctcctaaccttgcccggtggaatgtcatggacttcttcactcccaagatcagcctttctctcgtatgtaccccttcatcagggtctcagtataccctttgtcgctgtgagtcattctccgacatccaggtaggacataacgtctcccaaatataattattgtacgctgacagaaccccatttacagtattcttgctgccttccaccgcctctcaggtcctcgttatcttatcacagaatgggaattcactgtagcccttcctaggccactatattgttgctacccttggatattccccggccgatcataaccgccttctcaaaatggaccaagaggaggctccaccacccccgtactcggccgtcgacccattactcgcacctgcgagcagtcggaacaacagctcttctcaggccccaatagttcctggtgcgattgtctccccaacgcaggatgccagtagctctcgtgtcccaatacagccgacggtcgtgccgacgcatttcagatccgccgctgcgtactttgaggaacggcttccctcggtcttggacgagagccgggatcttctgcaacatcatatgaccatctacccccggagccaggctaaggattttccacgacggccacggtgctgggcctctcgattagatgaggttacccagcaggactgggatacattcttaaagtatctatttccgccgcaattggggctcgctgcatcctctcagcatctcccacgccaattgcgagcggagattagacgagaccgcaaagatcgcccacaggagactgatgagcaacggaaagctcgaatcgcggccgttgtcgccgaatggaacgaatgctttttcgagctccgcgctacccagattgtctttgtctacgtaggcgaacctgattctgcaccatcgtccgctttatgtccccgatgctatccagcggcaacgggttcgatagatggccagccgattcgaaattcaaatgctccgtcacccgtgcctgggcagcacgttccttctccgactccttggtcgatgcctccctctatgttccataacccccaagtatatgtgcccccatctccatatggagtatatggtgttcctccataccctccccccatatctcctaaccaaccacctcaatactatacccacccaccacaaggcccatggcaatggaacaattggaactatacgcagcagcaaccgcagtaccccaataatggcacccccaaggctggatccggtgggtggatttcacagatcgcatcacaagcccagaaatatggagagcggttcagcgaacaggcgctacaatatggacggcaggtcgaggagcaggctattgcacatggccgctggattgaggaacaggcaaggcttcatagtcggaaagcactaatggctggacctccatacggtggtgggtactatcctcggccggcctgggataactcgcctcgtcccatagccaacattccgttgacacccattcaaagccctagccctgtgacaagtcctaatccgacgggtcggcctgagacaatcgatcagattgatagcaataagcctaagccctctacagaacaacttagggtagagccacccgcgaccgaacatactagacgagtatcggtgagctccgtgtcatctgagtcctcgttcagctcaattgactccatctcgacaacatcggacctgggcgcttcagaccttgccacagtgcgcacccaattggagcttctagacgatcgtcatgatcgggtattatatgacgccgccgtggacctccgccggcaactgtcggtcctgcaagagtcccgccgagaagccaagttctccggtaataactggcgagcaggtttcagccagagccaacaaaacagccaacaatccggcgacgccgactggggtcgctgggactcacctgagcagcagcaacgcaactcggtcgatagacgcgccatgaaagaagaaatgcgtgccactaaaaaagcattccgggacacgctgcgccgagcacgagacgagcagcgtgaacgcaaacgcactcgacgccgccaggtccgacaagctcgcgctaatgacagcgacacggcgaatcatatgccttcccagccgctagatcagcagcttgggacgttgcggctggaagattcgcggcaatttaacccgcctatgcctccacgtccagtcaccacacaagcacagcctagtccggtttctacaccgaatagctcgaatgtcggatttggatttgcttccaattccctctcccctgctatctcgcggctaagtatgcaggagtcggcacctactggagactctggcgcctttgtgaagaaagggaagccgggtgatacgtcaagtcggctaaaggatatgctcttaccgcgcaaggcgagaaagcaacagccgaaggacgaggatacgggaagtaaatgatttgcatatgtcttctcttctctttggttttatcttatttggttctattttcagcgtggtgtccaatgttttcttgggaggacggcaaaaatgaatttgctctgctcaatgcatagttcagatctcgaccacatcgaagtcgacgaagttacgattcacattgatacagtacatttgcgaaaactttatatatcgaaatcaaactttttcaaaaagatctcttatacatacaaagagcaataacccatgcccatttgagtctatcttcacatatcctctaagccttcgactcattcttctcaactaaatcaccaaccccaagtcctctcccaaccttaacccgaatcatcttctccgcatccttcttcccaagctccccaacctcttcgccctcatcctcgttcccttcctccccattcttttccttattattctccgcatcccgcttttcaatcgccttccaatcaagccacaagttctgaagattcaagcgcatagcatacgcatcctcgccgtcggcatagtacccgtcctcgaccttctcgacctcaaagccaagcgtatcgcggtacagtcgcagcgcagcaatgttcgacatgcgcacgtgcagcgagacgaaatgggcgcggtgagattcagccattgcgcgttctgcaagaaagaatggaattagaaaaccggactgtaattatatgcgaatatgcagcgtttgcaggtcgtttcaaatacaaatgcaaatgcaaatgaaaatgcaaatgcaaaatgtaaaatattagatataaaatcaagaatatcactcacgactcatccgcatcaacctctccgcaatccccaaccgtctatgcgtgcgcataacactcagactggtaatatgaccatgctgattcccgtccgtaggctcctcctccatcttcgcgagcacgtatccaacgaccttgggatactcgcctgagatattgccggccatgccgacgcctttggggccaggcttgtgtcccccgcgtggacgcacgaccgcgacgaagcttagctgcggccaggtcagggcatggtacaggtagtattttaggaagtagttctcgggtaggttcgttatgttgcaggtttggattgaggggaggaggtcgatgtaggagggatagctgctgagagggacgatgtcgaccattttggcggttttgtgcgcgcaggcgagggtttgtggtggtgagggggtggttttgggtgagggttgatggtggagttggtttgcggtgcggtggggggtggtcatgtgatgtcggggagggagctggggatgtagattgtatgtaggttgtgatggggagggttggattggctattttgctatggtttatatgttggttttggttttggtcgtctggaaatattttattttgatttgttcagttcgagtgaactgcgcatgtccgcttgttgaccatgatgtttatgaatagatcgaataaactacaacattgtacacaaatatgtactatatcaaaatcatatgcagtacaatatatgtacggccaaaaaaagaagaaagaaacctagcgccgacgaccgatccggtcatgcacccaaagtagtcatagatatcgtggaaatcagaacgcagacatcaccacctgcactcccactgccaccagaagcaccgtcgaaataccagcgatagagacctcgcgcagcgcgccagatgtcttgccacagcatttacggttgtaagtgacattgttcatctgggcagcgacctcgaagaccgagccgttgaaattgccgtaattataataatcgaccagaaggaagttgggaggactgccccaggttgctgttcagagttagcaacgcacattaagaatcaaacacatgtcaacttacagttacattccctggccattgcgcctagactgccactaccgttcacagcattggtctcgtcaatcgaagcagtattgggaatcaacaagctcagagagccgaggttcagctgcaggttcaaattgtggttggccatgtacatgcggttcttagcggctgtcacagacagaccgggtgggcgttgctgcgtgcaggggaaggtggggtcagtaggcgaaaatggcgtctcccacacctgcgagaactcatccatcagccatgggtacgcggtctggttggcttggtagtccatgaagaagactgcacgcttctgcctgaggatcatctccgaaagtgtgggccagtcgtccaggcccattgggaccttggtgggggtgtatatgaggtccttcagtccggagttgtagattggggtggtgaagttagcgggcgagacatagtcgtaattgccgatgatgaaggtcaccacgtcgtatgggttcttccgcatccacgtgttgacctcgactaggtatgcttccagtgtgccgacattgagcaattggcaggtcgtgtggcacaagtacattgtgccgttctcgtagtgcgtttggaattgcactaatccacaggttaataatcgcttacttctcaaaaggcaatgcaccgccgcttcacttacgcagccgaattccatcattcaattgtgttgtcacatccagtacctggttggcggcgacgctgttcttgcgcacgaacggactgttgtgtgctgcgaccatggtaatgttggagtacttcctggcacagaactcggggtagtcgttgcaaggtcgggtgttaacgacaggcgcttgggtagatgtactggtcctagtcgcagttgcgttcatgctattgttcccgatcaccgtcgttcctccgcctccgccgcccactagcaaagtcaaggagtcggaagtcatagtgactgcctgcgtctggttggaggcggtcatggtgccattgtgttgagtggtcgatgcaatgaccgacttgtcgccatcacccagtgtgattgttgtagtgaggtcttggtaggtaccggagggaatggcgatgggagtcgtgactgacacaatggtgggttcatcggtggtggtcttcccggattccgtagatgatttggtagatttggtggattcggtagattcggtcgattctgtagattcggcctgggccgcggcaacggcgaggaagccgaggacaatagtaggccacctcatcctatgtgatatgaagactctacgtctccaagataggaggagaaaatgacggggaaatactccaacttacctaatcggcacgtggaggctttgacgatatgacgttgaccaccaataaaggagaatgatgggccaattgtatttttatatttttctatcactttaggggggcgaagtggatgatttttagcctgggtctcgtgccgattgctgcctgttataaatttagtccttcttatacttttgtctcacatatagcggctgcactattattgtatattgctctatattattctactaaatctgcttattggctgtggtattgccctttccttgcttttcagctatctccatacctctatccatgccttgatgaactaatatagtccgaatgatcgacagcgtaggccaggggccaacaccgctagtgtccagccaccgacgatctcgtggcagacgcgacgatccgttgaaatttcttaaattttgaaactaatagaccgaataggcccaggaaaccctaggaaccctgggaaacccaagaaatcccttttaaaagctaaaaacaataaaacaatccaatcccatttgcctggaggcgatcgggagatatttcatggcctaacgtcatccccggagaccttaggcaaccctaattttcctcatctcctggggattttgggactttctctccttttcactcatttatcacatttctatcatgcattggacggaaaatggcaagcgaaagcttcctttttttaagtccactaccccaattgaccgccagcgaaagaccaccgttcgttggcaccgcctgttacggtcgctgttgtacttgatcgcttggatctttatgctactggtagtcattggcaacatctctaacaggcccgtcctacgcaatacctacttcctctacctcgatctttccaatattattcccgtctctattcccaatgccgtccttatcaactctatcgcccagactatcgggctgcatgacttctaccaggtcggcctatggaacttctgcgaaggatacgatgaccagggcatcacccattgctccaagccggagactctctatgcctttaacccggttgagattatcctgaacgagctgctggccggtgcgacgggtacgttctacaatatccccgcacccaacgactcccctggaatgcgaagactaacagctacacccagtcgctctcccatccgacatcgaaagcccattaaaactagcccgcactgcctcccactggatgttcggaatcctcctatccgcagcagtcctcaacttcgtcatgatcttcctcgccccgcttgccgtgtcctcccgacacccacggagcatcaaagcctgggccgcagaatacaacaacggccacccgcccgcgggcaagccaccccaccgccgatgcaccttcatctggttccgtgcgctgcccatgctgattctgacatttttcaccgcgctcgtgacaatcgtcgggtcagccgtcgcgaccgttatgttcgagatcttcgccaatgtcttcgcaaccgccgatccgagcatcaacatccgggcgcatgtcggtacccagatgatggtctttatgtggatcgcttcgggtttcagtttgttcgctttcatccttcagcttggctcttgctgcgcggcttgctgccgtggcggcaaggcgcgcaagcaactcaagtcggagggtgtcaactggcgcgagaagggttctctttcccccgttgcggctgaatctcgcggtgtctcgtcctgccgagatgctgctggtctccccgaggatggttccgggtctagtggtcatgcgttttcgaatgaacatgagcggaagctgatcaatgggcatgctccgacccagcatcattcttcgactgaacctcatgcaatctctacctgatctcgatcgccatttccctcaattttagtcatatccttaccctcctctccggattcattctcctttctaccattctcatcatctttggggtgttttttttttgccaatacccaccaacactgtgccatagtgctcccatttctgggcatttaccatattttatctaccattatctacttaggtacgattttacgattcgactgcgaagaactagaggctcgacatttcttgtttattacaatatccatctcacgaaacttgtttattggatgtcgattgagtagaaatatataaattctgctcttaatttttccactgcttcttttcccttccccgcattggctacgtcacagagccgtcgtaagctccaagtctttgccacgatcccaagtccctctgttgagttctgattcgttcattcgcatccaaccgattacctcccccacttatagataggcgtatctccactatagcttcctcatacacattatattacaacctatcacacagatcagccataaccgaagcgcacatcaaacacctaatccgtactacgtattcgcaatcgacccgaccaattgatcaaccatgccttggcaaccaaggataacccaaaatcccgaaaggaccccggggaccctgatcgggtcgatcgattcgatcgacagtagagcaatcaccacaccaaaacggaacaagccctaggtgaaaaacaccccgaggcattagtcgagaaggtacaaagaccttcaagttagtatctatgtgctgaatctcatattatacggagtccaatggaattctgcgctcagggtcgggtcagggtcgggagtgccgtcacccgcatccccgataataccatattgatgctgctattcctggagaactgcatatctgcgcattgtctgttatcagcactagattcatacaacagaatctgttcgctaattgttctatcgttcgaggcgcaaaactagtccagtggagaggcggcacacatccactctatctctggcccgtctgggctattgctgatccttctacatacgtatctcgtaccaatactccgtggacttggcatcgatggtggatttgccacgataggtggtgcgcaatcgaaaaatcgtggctgtaggttccatggtcggatacctggtagttcatcacccaggcaaaaccttccaaggctgcatatatgagaatgggtattcatggatgtaattctctgtctttcaatttcccgaggtcaacacaatctgacgaatacaaaataatacacagtgacgtggatcttgaccacgtagttttcactctgccactgtaaggctcttgtggtgattggtctcgaagacacaactgctgaggagcgggtaaagccttgggggtaagcttgccctgcccgtgaaagacggcaagccctacgtatctagactgggcatgcggggccccttctgattggggtgaacccacaaaaagcgccacgatgagaagtggagactccactcagtatgcaacgtccaacatgcatcctgatatgcctaactcattcaatcgctttgctggttattagttgagagcagggaatatatcacgctgcagaagctggcttctcgatgaatttcgccgcaaggctgtgcccggcgctgtactgtgaggccgcaggggcagaagacgcaggaacttgggggactagctggacgagtctggccgctgtggtcgaacttgaggttgccatgataatatggttctcggcataagcgagctgaacgttcaagaccgttgtatggttcaaatggatctactatatagttactttctatccttatatcccaaccacatccggatcccggcaaggtcgcccgtctcgggagccgggtccagacctaacttagaggctctgttggaagcgggggccaatctatacgccctagactatctaaagtagctggtatatgtgtcacctttgtgatacaatcgcctagaaaggaataacccccgaatagcctattactacaaaaacagacaccggagtgcagagaagtctagcagcgcgccaaggcctggcgcgccgagctgcaacgtgcgtgacacagacctcgtcaataccgttatcgaggatatcgccacgggcgccgtatacatagatgacctaggtagtcgcggcagccgcaatccaggggtagagagatatactaccgctatggtgtgaggatgcagtcgattgaattggagaattgttctctattatcccttaggcctaactagcgtgatctttctacagcagctactatctatctgcgcatcgaataccatacgctgtgagattacagacatcatagattgattgatagatactcggtatcgggagaaacaggtgggatattagggaagatgcaatcacattgcgcaacaaatgccaaagcacacagacgcagagaatagagggggaaatcaatttcaaaggtcaagtatagattctagacacaaatagataaaaacgacatgcacagaagtgatcaaacccatgctcaccacccgaagatgtggacaataaaatagctccagtcaatgagaaaggaagatcaaggaaataaacagggtatcgatatggaataaaaataaagccaggtgagaccgaaataagcacgcaagccccagagaaaaatcacaaaatcaagatgagaaaagaagagaactactcgtactgacatggatgcatgaagtaatgacaacgcaagaaaaatcgaggaaggaaaaaaaaaaaaatcatgagcccgttctcgttcactcctagtacgccgactgatcggtccccgtattgatacgccgtgtatgcaaaggtcaagctcgaatgacccaataagaaaggcaaaaacgagccatctagcccatctccatgccgtactcgtcctcctccttgaagctcatagcagcatggccagcactgttccagtactgcggctgaccagcgccgttggcactgctagtaccgctgtggaacgaaggactcaggctcggaggtgtcaggccggacatgtcgccgccctgcacggcatcgccggcaatgttagtgtgcttgggtacgcgtaaaccgctacccggtccgcgagtgtagctgaaggaagttgggtcattcctctccagtgcatcgaggatctcgctgcgcatgcgcttctcctcttcggtttgctcgaagggccaagttccacccaggctgccgatcagctcggcgagttccgcttcttgctggtatttgacatgtagggcccacatcagatcgcgagtccagctgacggcaccgttgagtatgtcacccttgttaggacctttctccttttcttcgattgggagacccattgtgatgttacccgccgtcgcacggcgaccgttgcctccagcgaggagagacgtggcggcacttccacctgcaccggccatggaaagagcggtgttgttcacaagttgcttccggaccttgtcgtcttctagtctgtgctgaggaaccaggtgggagagatcctgaatgcgttcgttgatattgtcacgtcggcggcgttctaccaggttatgcgaggcgcggcgacgtcggcgcttggcttcttgtgattcgagatctcccccgccaccagggagatgcgcgtcaaccttggcgggcagtgaggcgtgcttcccagacttgaggatctcggaaatgccggtgtggtgcgattggtggggaggagatgagataggagaggattcgacgtaagactgtgcgctgccgggagttccatcccactggttggatagggttttctggtgacgagcctgcaggccggtccggataggctgggacgggaagctgccagactcaggggtacccaatgtcaaggaacccagtgcgggtgtctttggggtcatggggctgcggccgtcagatgaggtacggtccatgccttgcaagctctggcgcttggtgccgaggtagttctggtcgaaagagctggcatggatgtggggattttgctggttcatgcgatactgctcatagttgaagctgttttggacgaacgggctggccatgggagcattatctggggtgttggagtacatatgcgacatctgactttggtgactcatcgcgataccaccagcagactggtcttgaagataattcacattgtcgcgctgatgaccgttttgaccgctgatctcgagatccaacaactcgtctgtatcgatgccggagtttccgaagttaaagctggatgacatgttctgttgcgagccgtaggagtagggcatgaagccattctgctgctgcatgttcaagtcggacggatcgatcgcatcgttggggaattggttacccatcgagtaaccggagtgtgacatgatgaaaggggtgtagtcgtcggattcgtgtttgatgaagagactcgcttcagccatagcctggtgaaacaatatgggggtttgaaaatggggcggagatcggcgaggggctaagggaggagtcgtggtgccgatcctactgactctccgcgacagttgtcaaaagttaggcgatccgagatgcccgataatgaagaatattggatgaggtggggatgtgagaatgtcacgatctgtgtgcatggaaaagatgttagtcaagactcgaccccgcccgtaggcgacttgaagatgtcgtggcctccgtgcgcaaggcaacaggcaacccaacaaaatgcaaaatagaaagtgaaaaaaggaatgtgaataattacccttgaaacaatgaggattggaagaatgaagtccggggagactgtgagacgtgccaataagccgggggaatttcctcggtcttaaacccgggatgggtgcagatctcgaccacaaaggtgtcttgaagaaatcgcaaggcacaaggtgtaaggtgtaaagtgatagtatcttggagaagttctatagaactttgtaagtgatgaaagagaaagaaataaagctgagtagtgcgcaaatgcgaggaatgaaagagaaccggggaccaggaagaagaaaagagatcaaaagaccagagacgagcagggaatgaaccaagctcaaatcaggtactcccagctgaactcggttgatcccagttgatcccagttggagtatttgatcccagttatcctttgcagatgtaaaaagtctggagaagaaacaagcggtgggaaggcggtgagatggcgatctggggaatttttttgtcgagaacgttggcctcggtatcatatagttcgtagttcatacttcacccgaagttgtatattggccacattggatttgagtatctcttgcgccttgaccccccgggtttgctcaggatttgatgcccacgctcggattgcaatcggaatacgagttgatgcaagcgcttacttcttaataacaaaagaaaaggacatgcttgggcttgggtttgaggctgatgaaatgtaggacctaccaagtgaagaagcgtatgcgaagtcggtgtatgtaagtatacttaggtagactgaggtataaacctgtgttgaggttagtgaaagatcaagagtatacatcccaagacatctcaataagcatgcaggtccagacatgtaagacatatcagcagagccccgttcacacgtgggcacctggcgacaagacatatatcacagatgcaggaacgaaggggatatgtgatatatgagaaggaacttgacacgtaccttgatctgtatgctaaactaggagttcacggggcataaagtcttcacaaatcagaagttcgagagcagaagtgcagtgacaactcagaggaaagctcttgctggtttcgcagacggacaccgaggggatggagactttatgaactcaagcggcgctctcctgcatctctcatttgatatattacagcatcggtcatgcagcccgtcgatcggtgggaatcgatgagattcacctacgccatcggacatggatttttatttttattttagaattaagttgactactaccatctggatcagaagggaaaaagggcgtgtgtgagtgtaaatggatgtgagtggatattgggtgaaggaggggtggcaacggtaaacccccgagcctcttttgtgtttttcttcttcgtactatacatagataataataataataataaagggaaatactaaaggaaaaaaacattatcatattcacaacccaaaataaaaaacatacttgggcaaaggggggaagggtgatacggccggatcaagtaaaacggctatcccatgatacacattggtatatttgtcacctgttactgcaatcatgactcacggatgtcttgaatagagcaagcaggaatgtatcagatgagattttggggttacaagcataccgaaacctatcttctcagaaacccttatctatcattcagagtgggagttttgcagcgtatattcaagattcccgaacgaggccatgtggatatggttgagctacattaacaatgcagagtactagcactcaagatgccggagatggtatagatcggctagcaaccgtaaatgactacgagtcgcaaatatcatccggagaacctaacatgcataatcccattaccttggcaataccagagatagacaagattggacaagatcctagtgtatatgcgaaagaaaagcataaaagaggaaagaggaaagagaaaaagaacaaagaataacacagaccacatccataagcactagtatcaactctgcaagagcatctgtgcggtctactcttcatgtgggatgtcgtgcagaggagtctggagtgacgatcatatccgcactgtgatcgtcaagggagcttggaccttcatcttcctccgctctgactacgcacttagccttgagtctcttctttggtttatttttgttctacgtaggaggcggacttgtggttgttgatctaggatacagcggcaaagggaataatgttatagttcaatatttggaactctacagaatgttcaaggcagtcagtaacttcggacttcggacttaactgtccggcctttatcggaagcaaaaagtagaatggtagaatacgcagaaagacaattggaggggttggaatgtgtctaagaccctccaccaatagtgaatcaaagcaatacacctcgctttggtatgactgtgctaagccacatcgccaaactttcccctctttgagagccactctagtttaggggatcatagtatgctgagatcgacggatggggactgatctccgagatttgagtggaaatggatctgacgtcccgtcccgtcaaggttcagctatacactagtaatccacggtcgacgcaagggagaggagttgtatccaacgatctactttggtggtattcaatacacgatgttgagactatctatctcttactcaaagtacccgtgcacaggaccctgacatgacgacatcgtacgtggttaaggtcgcactccattccggggtcacggataaactgcctcgtgtgcgtcgaggacatcctacagagtatgtctgaaaaagcaagagaaaacagggaaactgaaaaagccaaagcagaacccaaatttggagaaacaatgaggctagtgataatgttacccacggtgcagtccggatgcatattagtgcccttatggttatcggataattcccctacgtggtacacgggtagctacataaatacagtcaacagggaaaggttatataatgggtatgcaacatcatctgtctggagttcttccgatacgactagcggcaactatagccgttataccgttattgatagatgcttctgcagggctgtccaatacaacaactttgccgccactctactgttacagttacggccgatcgctacagggtgcgcaccagccatgaaggatcgacagtgggacggcaactaatgattagaagttgcagaaagagcgggggcactatcaataatggtcatgagtctagatcgggtatagtaaagaatagactattattatagtgcaaattaatattatagtaagtcagtcatatggcaatcacattcaaagcatgtcgatttgtttatgcaacaaaaacctctaggggagtacagactatagttctacatgtctttaggggatttaaccctacagtaggtatagcgcaaaggaaagaaatatggataattatacaatgttataataacctaaaaacgactaagaatagatagtaatctatattcaataatacacaaagtcgctgtagctgggttatatacttgctacatattggatcacgctataccccattgggaactagcctcctttccccgacttcattgcagaactgggaactgccactatacaactatacctctacacgccacataggcaacatttcaccctcttggtaagtgacatgtatttctttcattcccctggttataatcctatggggggataatcctggtcaataaccccacagggctcggtccgagagctttgtacccaaacactggaaaccatcatcatctgacagtttcagcacttaacgccgatcgggttggtcacatcggtagcttcacgccatctcgtcattttgcttggttcccctcgtctttataccctcctttctcgatagcgctgcgcttccttgtccaatcagcactccctacgctgtgttcgcttcccatcccttctcggattgtgcccgcaaggttcaagctttccacctatcttccgtttggttggcttatctcgccacatttttgaacggcgtaccctcgattgcgatacacttgcgccgcgccagaggaatcccaagctaccccggtagccatcgccagctccgcagagatagctgcagatcccgttgggctgacgccttatcactgtgcaatagacagacttttcttggtcgcggagattgtccataaagtttatctgccagcgtgctattcaaagcctttgatctttcgatcttgaccggcatatctccgagtcggagaactttcctggaaagtaggcccgttcgaacccagtcacggcgtgtcccagctcatcagaagccggatccacattcgacacagtcgtcatctgcttctctgttggcttgagcaagtccccacctctagccaatccttacggatcatccaccacccgcgcagatcatctgcactccatctcgcatagtccctgcagagtgttctcttgtcttgacttcctagactacgggccttttctgcagacgcagtagtgcacgtacctctactcgttttatttgggatctaaaactcgactaaaatctgacttaaattagtctcaaacatggcgaataactcgttccgagactctgtcaactcactgggatggtcgcgtagagacccggatctccccgtgcaaactggcgcgtcatcgaacaccccattcttatctcgtctacagtcttacaaccccttcggcgaagggggttatgttcaactgcccactcacaatgaaggtcctggggccccgttgccggcaccaactcgacgggaagaagaagagggattctttgcttgtaagtattttattgtctgtcttgtgatcccccgcttcccagatcttcccgtaccccgttgcataaggtccaggtgatgagactgcagttcctgcgccggcaggattcattaccaccatttgcaagtcgataaatgaagagagaaaatcactaacatggactgtgtatagtgagtcggtgggatcgcatgctcatctttggtgcatgtaatttgggcgcagccatctgtttcatgatctgcttcttcttgttccctgtcttgtcactcaagccccgcaaattcgcggtcttgtaagttgcctccgcgatggtccgcattaatgtgggctatgttttccggctttctatggcccttccagctttatttccttttttccccggctatctcatgctctcggacgaccgagcaaatcccgagctaggatagaccaggtcatcggtcaattttggttagggccatgtgcgcctttgtacttcacactggaagctgattggccttgattgacctatatctgcgcctcatgccaagaacattcgtctctggtcttggatatctcttgctaacaggtttctttattagatggtccgtcggctcagtcttgtttttgctatcatgggcggttctcatgggaccgtggacttacgctaagcatttggtctcggggacacggttgccattcacagcggcctattttggatcgatcgccctcacgctctacttcgctatcggggtaagtaaaatcgatttctttatctttcttttttcgttttcgttttcggatttggattttgtgtttgatctttacgctttacctcgttgtgcgccgacgatccttcctctcctcatgatactcccctctgcatttgcttgtttgtcgcacactcgctctccctctctctatcctagtccgtcttgtcgcactgcacaaccgggaaaaggggaattttgcaaccttcacacccatcgcgcagtacaacctgaatccacggcttgtcatgtctgttgttggccgcagctactttggatccttcgaatttatcacactctgcgctcggccgtcctctctactctaactcttgcgtctgtgccacgtcccaccacggtgcgggacttggatgtcctttcccttacttcaccttgtccaacacctaccggtgtcacagagcgcggagtccagagcatcgagatcaacctgtgtctcaccgtccctggctatcaagtcatcttgttctatccgcatatcacaactacacaccatccacttgccgcattcggcaaaacatcctcttctggaaactcatgctgacttcttcttttcggtgcattctagcgtcagaacctcttcctcactctgatcttctcgatctttcagctcgcggccctcgtctggtacctcgtcagctatttccccatgggcagtaccggcctgcagtacgtgggtcgtttcggagcatcgcgtgtcaccgcttgggtcagtggttaatttgttcacttgctcgtatctgatatcctgctctttgtcggctctcacatatatcgaacggtatactcgttgttgcttcgataacgggcgtggtttgggctatttgttgtgtatatgtagctagccagaactacagtgtttggcactttgatttcattttttccctccaaatacttacctttgcgtgtggacttcgtctcttggtagcacagcactgaatattaatatcagaaaatgggaccttgtaggttactagtgcatatatcggacttcaggctacgcttgatgggtttccctttccgctttagtgttcagctcttgccgctttttgacctctcaagtgaactgggggacgttcctaatcacactcaggcattacctagtatcagagataaactacctgagacctaatcttagaagcgaagtaaatatgaatagtaaaaatccatttgatatcaaagctagcttaacgaataagaatgaggacacgcaggcataagatctacaggtaatgcaagcagcaccgtaaaatgcaatccagcaaagtcatagtaatagtcatagtcagcacgaaagaaatcaagccccaggttcaacgaccactctgtttcatcttctcagtcattcacattgaaaagtccccttcaatacttcccccgactcatgaccaacccaacaacaccatcaacaaccttaacaccctcgacctccgcctcaaaaatccccgtctcaccaccagacccgacctcaacccaccgccgcagtaaatcattactctccttcggcttaacatctggcgccaccgtgccgaccgtgatatgcggaatagaattcgcacacggccattcagccgcaccggtctctgtctcaacgccctcggcaggcaggatgcgcgcgacaaaggccatgatgcggttgtcccagacgagacgctcgatgcgcacacgcgcggagcccagggctggcgggtactgggctggattttggacggggtttttggtctgggtgtcgatgtagcagtttgctagctggtcccagatctctgggttgtctttcttcgaggcgcggtggatgagggttacgtggaaggttggttggagacggcgggagtttacgagttgattgtagagacgggctgtttcgggggctgttgttggccggaagagggagtgcaggattgaggttatttcggtggttgggagggagatgttgaagtattcgatctttttggagagggcttctggtgagaagggggagtctgttggttcgggaaggagggggccgggttcttgactcttggtctttttctttggcttctgtggagcgccgtagctgtagctgagatcctttgtcacggtatagtcgtttagggaggcgtcgatggcttcgtccagctctgctgccgttggcatggttggaactaggcgggggtaggcggcgtgtagggctctgacgactgtttcgaggttctcgcgagaggaggcgcacacgtcgaggtcaatgacgtgatcgaagacctggtctggcaagcgggtggtgtcgacgccttcgaagcggccgaggaatccctccatgattccgacggtctcttctcgggcgttggtgccagcccggatggattggtgattgtcgccacgctctagcacacgctttcgagtgacttctcgaatggcgggaagcatgtctgccttgggctcgtgaacccaatgcagagcgacgaactgcgcatccggaagcacggggtagatatcgtccatgagctgcttccgctcgcgccgttgatggttgttgcgatcggcgattacaacactatgctctcctagagcatggctaatctcgaaagcgaacttctgtgccttgttcctctgtttgggaatgttgtcgttctgaacatgtccccatccgaagagcttaaccagagccaaggcgactgtcgtctttccacatcccagcgaggcaaccggtgcgaggatgacatgtttgttgacatccagagattcgttcagccttttagcctctagagcgataagctcggatccattcattcctcgttctttgaggaactcatcccgcaaagcgatgataccgtggttattcaggtaatcatttgccatgtcagggttcctcagcagagtccgtcgagcgaactgcaagtactcttcagtgaccttctcatgcttcttgatcttggggtgtttccccctgataacggatttggtgcattcacgccactggcggtacatcaagtacggctcttcgaacttatacttgaagaaccaattccggtagggttcagttccgttatcgctcagctggcatcggatgacgaagccctcagtctcacgtccatcccatgttcctgtctccgcgcatccttctaggaagttctgcaccctgaagatgtcatcaaatacctcgaacttggccttcttgaatccccagtcgtcagcaaacttatgcaccttgtcacaagacattgtctgaaaatcaggctggttgtagttgagaccgtggaggtaaatgcccgaagaagcctcatcgtaggccagcacatgctcctcaaaagtgtcgtcgcagagttctccaacggctgtgatattcatctcgcgcagagtccgggcaagctccttgacagatcgattcacggacgagacatggcgttccacccaacgttctcctgcctgcgcgtgggagactttcgtatcgtcgcgggctccagtcgagtgtttactgcagactagcaatgtgtcgtcttccaaagcagaaatgaaaataatgcatccattctcctttacactcagctcgtagggaccccttgtgtttttctcaatgttgcgccattctgtgttctttgtctcgcctacgttgaagaacttgtcgtatccgcgcgttgcgatttcgggggtgttgtccttccgtttggtggtgaaaagacctcgcgcatatgtcggcaggccggcctgcttgtagtcccagtcctggaacttccacgagtccacaataacattattggctagcacaaaggtgtgctttttgcaggtgaaccttagctggccctttctagctttgcgagcagtctccaggcttttcaccagctgtgagatgacgtgcggatcttgagtcgccatttcttgtgagttgggtatatcaaagtgtgagatctgcacggagaggaggggcagccaagagtgggggaagagaaaaggtgggatatttttaccgacctcccacccaagaattcaggagtatttagagaaaaacgcagaataaagcataaaagaaaggagtacagaaaagatcagacgaagagtcagaccgaatgtgtcagatcaggtgcggggagccgaaagggaaaggcgggatattttctttttcagctttgacttgcctgaacatcaccaactacttctgactcacctaatttacgagttttaatcaatacttctgactcatggctcaaaatccttacctattggcctgcgacaacccaaaggttcttctggacctgctgcggtccaatccttcgatcgcatcgagccaggatgagtccggctactcattgctgcacgccgcagcctcctacggccataccgatctcctacgcgctctagtgaaagaattcaatgtcaacgtcaacctgctcgacgaagatggcgagacatgtctatttgtggtcgagaacagtgacattgcgcgctgcttaatcgaggagctgggtgtggacgccaataagaagaacgccgaggacttgacagccgtggaaaagtttgagacagaaaatgagttcccgcaggtcgctgcctacctccgcgaagtcgtcggtggtgctcccgctccaacacacgcccaggccgcagaagttttgaattcgcccggacccatccctggcagcaatatgaaggtgaacattggtacaatgacggaagaagaggcaaatgctggtggtgagcctgatccagaattcaagaggcgcattgaggagcttgctgctcgtgaggattattacagcgaggaggtgcaaaatgaggtgcgcgagttggtcaaggatgccatggccggctccaatattgaagctatggaacgggaaattcggaggagaaccgagtaagcagaagcattgcgactgttccaacatctacatgaagccaccatcgcttttgaacatgcgaatcactggaagaaatccacccaagcaataccaccccgagtcccaaagtctctgctgattacatcgagcgcggacgggtactctgccgtgtcttcgggatcctttgtgtctcacttgaagttttgggtcgcgctgtgaagggtcgctgttagactcgctgttggcccttggggcttatccaagtggctcggaggccgaagagaagctccgatatgatcttgtaactaggattgaatcacgaaatatcacgatacatccattgaagcaattagcgcaagatacttacttgttaattggagatcatactagttattatgttgatgcaactgcgtagatcaccggtctagtccgccaagctcgagcccatcccgcatctccaacgtaacaactagcttcctacctacaacaacccccaacattatatcatggctcaaccaccgtctcctttccctccacaatcgcagttctactcatcccaaataatgaatcccgagacacctcctctaccacctccaaaacccaacagccacgaagccagtcgaggcggcaccccgcaaaatacctctgcacaagcctggcagccagacaaccagacaggcgcacaccaaggcgcatatcccaataatccccaacaactctatatccccgatcccccaacaatcgaggagggctggctcccagaactgctatcagacaagtcgtgggttccctcaaccttcaaacccctaaaaccaatgacaacacctctaacgcgcacaaacccagaacaaccgacctccagacaattatcaaagacccaagcctgatatccgccctctcaagccaacacgcctcctatacagcccgccaacaacacctcgagagcctaatccagaccaacaaagagctcgcaacccgcgtcttagaaatgcagaatcacctcgccgaagtccgcgcctccaccgagacgatgctgatcacacaccaatcgctagaggtctcctggcgtaagaagcaggccgagatggatgccgccctagccccgtggtcgccgaaggcgctataccagcgcttcagcgcggcgatcacggagcaggaagccgtctgccatgctgttgaagagagtttcctcgacgaagatcatcacggccgagccacagagaaggagattgcagattgggtccggcgcgtacggggcgaggcatccaagttggcggctcgcaaagaggccaaggcacggtgggatgagggtcgagttgggggttggcgatgaggtccaaacgcaacctcaagatacaaatatttactgtctgactgccatttacgatgccatgctgcctccgattcatgatctgtttattatgcactatacaatgcaatctacacggtgcttcaaggtcttgcttcatccgaatcacgcttaaaccaattccaggaatcaatcgtccactcacccctcacccctcatgcctaacagcctcactctcactactctccggcttgatacgtccctgtgcctgccccctaaacaccatatcccgcaccgcagccgcaccctcaacatccacatccaaaccccgctcatcggcccacccatcagtgcccagagaactcggaaagccaaccccccgcacaaaagcgcgtctccgactgcgcgcaccccaagcccagccgccaccgcgccgaatcggaagatggtacatgttaaacgcgatataagcgaagaaaaggccgatcgccgcgccgaagagaatatcaaagccattatgtctgtaattgaaccagcgcgacccagcaataaagcatgccgtggcagtcgggaagaacgcaatcagcattaggtagacgggcggcgcggcgccgcgtttccgcacggataaactatcatcgctgtagctctggtcttcaatcgggtagcgcgggagataaggaaatgcgacggagaatttcgagcagagccagagggttaggtaaattaagccggcgaaggagactggattgtgttagctaggattcgaatttatgtttgcgtactgtatgttgtcactgtaattacgcgtcggagcacaccgaagatgatatgcacgtaaacagttagagtaaatatggactcacaagaagaatgcccactcggaaaactcgcaaagccatcaatgcgcaacgaactactcctgtcgcgacaaatctcccacgaaacaagcgtcgccgcaccccgcaccgactccccaagcccgccaactgtgaactccgcaatgcgcgctacgtctggattgcagcgcgcgagaagatcaggtcgcggctttccgattaaggccttcagaccctgggtagcggtccaggtgcttgcgagggccagcgcgagccccatccagccgacgttccattcccagaatttgcggcggatatattgcgctgcgggggatttagaagagccggggttagaggtggaggtggaggaggtggccttcgctgggacgagtagccatgagaacaggaggattataatagccggggcgaagaggcagactaggagcagggttttggttgttacggtttctttggtgagggggtagctgattgttggatcggttaagctgaaggggtggtggtttggaggttgtttgtagaagccatagccgattagggcgatgccgctggtcgggggtcgttaattgggattttgatgggttcaatgggttggacgcacatgatgaatatccagtcgattatgtaggatagtactagaagcttggaaatagctgcgaggcgtgtcactgtctctttgacggagattggcatggtcgtgtgtgatacgtaattaggaaggaaatgttaaaaaaaataaaatgaagttcaagaaagaacgttggaaaaagtacatagacggggatgacgatgccagggatgattgtggcggagtaagaaggttaatttattttgaatttactcgaacacttcagatatacagtagcaacagttcgaagaggttgaaagaagattagatgactccatactattcatagatagtatccattgactccactttcctattgttcaggaaagtttatcactagatacaggttatagcaggagaatgtcgagaattgcagttttcatcaatttccaccaagcgaggtggttaacgcagtttgcttatatacaaactgcctaggaagtgccaagctcgcatgctacggatagcctcagtcggccatgaggacttacgatctgaccgaatagtagtttcttggtagtgattcatagagatagaaagacttctaaactacccatatgcatgtaagtagagcccccgagattaacaatttcaataatatcgagccaacgcctgcaattccaaagaaatagccaaagaaagatctagaatccagtaatcgtccggcggcccatgatggcatcgttcagctgtctgtgaacctgttgaaccccctcgaaccgaatgaatccacacgattcactttccaagtggttgaacagactagccagggagtggaactccttcggacagcctcgcttgaggcagtggtagaccttctcattgtggacgggtgagttgacatgcgaccccagcgcttttggcgagttgaacccctttttgcataggtaacacacccagcagctaccattccaggcattgtcggtgaccaggtatgtcatgtcctgttcatgttcaccgtgccacgcgatctgcttcttgcagacaataccattcggatcaagctgttgaataatgcggtggatgcggtcgcggttcaagccttgagcttgagggcaggcaccagactcaagatgatgggagacaccgctggcagtgacgaagccaacccgacagaatggacacgcaatgttggtgccgcgatggatcttggaattcaggtgctatgagataaagacgtgagtggaacgggttcaaagtttctctcggatcatatcagctcgcctacctggcgcaaacagttcgcgttcataaattgacggctgcattcttggcagtagttcttgtaatgtcctttggcgctcatatgattctccacggcctgctgcgtgtagaatttcattgggcatgcctcacatggaactttcgggagccaatgactcttcgcgttcatatggttgttagcggcgtgttgagtgcggaaggtgctgttgcaagtttcacagtcgaaagtcggcgcccagtggtctacagcattcatatgctgattgcaagcgttctgggtgcggaacgatcgattgcatgtttcacattcgatccagtgacgttcgtcatccatatgctcatcacagtcatcctgatcccagaatactgcatcgcaggtgatgcattcgaacatgatggactgatgtaaaggtaaagaatgatattagaagaagaaggggagagagagaaggatatatagacacatccaagaccttatctcttatctgctgagcaaacgcggcctgtacaacacactccgtttgatcgccatctaaaagtacacaaagacaacttagaaattattagaaagatagttgcgatgcatattttaggtaagtgtatagatatgaagcagtataaaggttgcttagaagatgcggtatcaactacataatgttatgaaagccgtgagagctagaaactacccctcaacctcacacttccgggctttctgactcctccccaggatgactgtacttaggtcgcccactggcagtgcgatggggaaatcgaccgcttcgaggatctgcgcaatgaaaatatgccaaatcggaagacagagggcaaaggtgaacgcaccagccgcctattgataaatcagtacacatttaatatcgaagagaacaataccatatttgcaatataccttttgtaatttggccgccagcactaggttccccagcgccatctggaaatatattcctgaaaataatccaaatgtgatcacaagcagaaagagcgcgaggaagaggcagacgttcgtgcggagggcgcaaattgtgtatacgaaggtgatgagtgcgagagtgacgtagtagaaacctgtaatatattcggtcaggacgtgcacatgtacatgatggggtgtgaaaggtaagactcaccgacagttgcgctgtattcagcggtctccatgcctttcagtgtgttgccatcagacgagtacattgtgccaacggcaaagaatggcatgagcgatgttccctgaaccagccagaatgtacctatgagctccagttagcaaatgcatggatgcgtccctaatccatgacgaactacacataccatatgtgaagaataatgcgcaagaaaatgtattccctagaatccattcgccaattgctccgaatatttgtaccattgcaccgaagaagatatagactggtctgtgggagggagttgttagtactgttttccttgcagcatcagtatggcctctcttacaaaatggcaccaccgtttccacctgctcctctccatcccatggtaagcattgcggtcggcgtcgcagacagcaagaaacccatcaatgaaatcggcgtgggatttccaaatgtggaacgcagctttcctgcatttggcgtcttggggctaaggtatagcttttcaaaaacatcccgtggtataggaagcataacactgtcggtggtctgataccgacgaagcatttctgccgtagaggtctctggcttgtcgccgatagtatcgtcggacattttggattcaagggaaggatttttctttcttgaaaaccctagcaacggcggctcgatggtaatggtgctgatctaacaccggaagacagcgtggaaaagaaaatatatgaaccagaccacgactcgcagccccttttatgctctttcggctattcaattattcggctgtatatctaggaaccgagcctcgcagggtcttaccaatctgttaccatataattctatttttgcaacaattacattctgtatatcttacacaccttcttgtttggaacaaagtgcggtggtattccccacaatcctcaaccaaaccccggatttgctccgtcgactggtaaccagcaacttggtctcggcctatagcgcgcaattaaacatgcgcgatccaccttgcaggtgaagcaattgggtagtatgattcgttggctgaatcacactagatgcagaacgggttagagcaatctcgtatcctccctagttttcgaattggcgtggggcagacagtggggggtgtgcatgttgcgcggtagtcatgtccgctccagttccgcttccccttttcgtgttcccccgcaatggagttgaaagccgaggtattggatctgcgggtcggcttcctagtatctagttttgatctatcaataatggctgaggtataaaggcgcacgcgtttattatagactcgcccagacctgggccatacttctttagctggctagtggcgccaataaaaagtgtaatcagtaaagcttgcttcggtcaagtcatattggccgcctcggcagttgggctggcaaatacagccgcgctttggcgagatgatattccgaccttgtggatgtgtggagtttggggaaaacctggggccccaggccccagtggagcttcaggaggataatgcatgacgtcatcaacgagtgattatcatagtcgatccaaaaaccaaccttgcaagcttgggttcacagagatctgacaatctcttacgccgcgttaccaccgcgattgctatcatagcccggcccataaagtcaatataatgttttattccggacgtgcaataaggggatctcgacaggctaggctacaagcctcgatcgttatccacgaaagagaaattgttcaaaatgtaatcaataaacagagacaatccggacagctctactcactttcatatatacaatatcagtcacactatgcacgagttattatggcacaaaccgatttacaacgagtggcctagacacgtcaagcgatacagtgataacatacatagattatacatatcttctccaagtgtctgaacaggcagaatgattgaggaaaaattgtgcagaaaactaccaaatattggctggaggatgaagaaaaagagaggctctgcgggaagtggggccgcttcagaccgaggatcggatctcggaataatgctgttcctggtagggtggtgcatcgtcacctttgaccagagacaaaatttcccagccctagacatcattttagctaataagacaactgcagggcaggcacttgagaaccactgttttaagtaagctacttgggatgtagaacgaaatgcttcagccctagctcgggaatcctacttaattctcctgttttataactatccttttactcgaaagctactagaaatatagaagatatagggactttcgagtactccatgttgaatatctgctctaaaatatattagcgacaagctcgcccgtaaatgcacgaggtattaaaatttaccaacgacgcaaaaatcacttaatacgttgaagacccgagacttagcagatctcgcgatcttctacgaaaaatatacgcccggttaacgacaaactcccccgatttgaccttcccatgaaagatatccaacatggcttcagccacttcataaactgcatcctcgtcgggaagttctccaccaacacgaatcgatacacagtgagagtacctatgatgcatgggtaattcgtcgactgtaacttgcctgttcacgacgcgatacatcatacggcggaccaactctagatcgttaagccaggcctcttctgggtcaaagtacaccgtggcccacacaacatgttgtccagatggtccgtcggctacaggaacatcgtctatacgagtcctgaacgcggttcgtgttgacatattgggtatgaattatgggaatgagcttggggattggctgtagtgggagtttttcttcttcggtggaacagggagtgagatagatggggctgggtgagtattccctcttcgagtggtggtaatgcctgggcataggagatcaaggtgttcatatactcccaactgagacatgatgatatgcctgactatatagtgggttgcttgggctcttggtagaaacaaagaatcttttaacaaaacaaccgctttgtccagtcttcttattctgattgtcttattgtctactaattataagactcgaagtcattctttgtctaaactcatacccactatatcaacaaaagaactcaatccagatcaatgcaaccctctcctccaacctttagaaagcatccgaccttaaatgaaagaaccgaaaaagtctctcccgatcaatctgaacattcccctccgcacattccgcctgataaaaaagcgccaaatccaacgcatccctaagaaaggcatcaaaaaacaaatggcgaaactgtggaaatgcccaataattcccacgggtcggtaacgagagacaccccatgactctgtggtgcatgggctcgggggtaatcgagatactgacacggtgtgttttcttagcgattctcgcgtggatggcctcggcgacgagatccatgaactccgcgtctgttttgtcgcgattttctggggtcgcgacgaatacgtttacccatactatgggtccctcgatgtcgcatctctcgtcaatgtaagcgccgtcgcgggtgaacataccttgcataccttcttgtgccatattgaattctttgatatgagggccactccaaactatttggtatcggctttaaaacagacaaagccttcctggtgtactggtggttgaaataggaattttatgagatatgctcgtataattatattacttgggatattgtcagggctttgttggcattgaaagtctatgtttctttgatacaatgacttttttgacatcaattgaagataagctagaaatgatccccattgtgggttgttaagacaaagactttgaaattgctatttctgtttctacatagttctgtaatgtatgtcggtcaatatcatagcttcattctcatatactagcttctcatctaacgttatgtactccgaattctactatcatctatatacagtttcacaaaatcatagcctcacagcttaatccacctccccatccaagtttcaacaacctctttagcctcgtcaaccagaccaagatcaagcaacaactgggttgtgccacgcacagccgaatccaacgccgaaaagatccaagcatgtgtataactagtatgctccccaatgaaaatagtcttaaactccgtctggtagtaagcaggcaaataaagctcctgctgcccaacaagcggactagcccaagcgcccgcctgatgctgatcgacctcccagcactggcgattgtatacacccgtaaactgctcagcagcaatctcaccatggacctcaaccatcgtgcgctggaccagcgcaacgtgttcttcctcgctcagtgccgctgtcgaccgagcgggcgtgtccgagatatatgacgctaggatcacacccggtccggtcgcattcatgttataggagggatagcacacattcccgaccccggggatatcaactgacccacatccgccgaagatgggcttttccatgtgctcccagaaccgcgtcttgtagagcagtgacatcttgcatgcggggctgtagttcatagtcgagattgcccggctcaggagtgatgagtaccggggtagatcccacagtctgaccttgctgaatggtgcagtgaccacggcatagtcgtattcttttgtttccggtaccatctggaagggatcgtcgcgccatgcgactgcgactttaccggctgtctcgttatatatcagtccggcgactgtgcggttgagagtcgttttctctgcgacgtgtgggtagaatgcgcgagggagggactccagacccttgtcgatggtgcgccatttggtggctgcgaagtagacgtcgtcatacatatcgctccagattggagaggtgtctgagccatcgacatagtcggttatgttggtattgtagcccatcgcgtatttcaagtatccggcctcggaccagtggaacatgccgtcttcgacggcttgcttgtgggcttgatacatgttggttgcgatcttgcggattgtctcccggttgttcattgtggtatagttatcgtatgcggattctgcttctgcgacagctgttgcattggacgaggctgccttgtagactagcgatgagttggcagcgacttgggcggcactaggaattaagccgttggggagacggttgccgccagaggctgcgggcacattggggctattctgtatccaggggatgaagttgacctggagatctcgtttatgtttgttcatcttgttgagaacgccggcgagttggaagaccatgcggtgatcttggatttcgagtgtctcgttcgtatcagcataggtaatgctaactgggaaccgcatcggtcccatctcctgatattgatactggtctggagtcgtgttgttgaggtatttcgtacggatgcgaccaccgactcgcccagatgattcatagatgtgccagtcgtggataccaacagaatcgagcagcagactcgtcatcaagccggacattccaccacccagaatggcaacagaggtactcttcgctttggaaacaaatgcttcgccgtgcttctttgatttcatgtaggccaccccgtcaaaccacgggcccatggcatctgccacatcggcgatactctcgcgcttcttgacaggtgatgagaccatgatgggagaggagcggcccacaagcgtcgatccggagaaagcatgcagacaatgtgaatggggtgcgtcggatggtgtagtccagacgaatcgctccggctgcgcctcgcgtttcacaaacgtgcttccgatctcatggtgactctgcgtcgggtcttggatcccgcattccccgtagacaagctgcagatgaccttcgaagtctctgtccaggaactcgacgtggacgttatgcaaagagtcggaagttacacccccagggctgtggaaccgtattacctcgatgtctctccccgcgaccccggctaggcttaaacctgatagacctaaccccaagagggtatgttgtagacaaactttcatccttgatctgagcagtagaaacgtggaaacaaaatatgagcgcttggcaatagtctaattgcctccatgcttgccgtacacgttttatatatctttttttttgttcgactcaagtatcttcggaagattgatcccgtatgtcaagctatcattatctttgagggggtatttcactgcaaccttcttatctagcggtgatattgtagctggcgaaggtatgtagatacgatttctgcatccgcaatatattactatagcctctgcagcttgactagcgtccatatcatccatcgcaaactgttacgtaaaatgacagcattctaagggccagtatgaatttagttagcatctcagatctagccagctagagacccggaatttttcgagagcacaggtcccactttgtcgagtgcagctgtcagtggctgtcagtttctcttatcaagacggttgtttccgactgctatgttatcttagagcggggtgttggagctgtctggggatcgatatgttgtattctatgttaagcgcggggaaggatatttcttgtagtcaagatatgggtttgatttggatcgacaatctcgatattcttatcagttggattcgtaacagtccaggaaggtacaaccgtgggtacataagtacgtaggataagaagtcagagccaatacgcttgagtctgtgaagcggctcggcaagagggctactctccaattggtccattcatcagacgatccgggaattttgatatgttcccagtgttccagttgatccaccacacgtgatgatctgcgggggcatttggctacataggtttatattaaattcctcacaggggaggttatagcgaagagtagagataagtaaataaagaagtatattaagccaagcggaatacttccatgttcggtacttccaaggctaccggtatgtagccggaaggcgccggacccactcggccattgcgggggaggatgatgtcatgctgatgcctgaatatgcctgactatgtacattgacccttgacacacaaagaatttccattgaaataccctgataaacgcatctaaatcatctaaaatgaaattctagataggagactttctagcccaatacagacaacctcggcacagtcatcgcaaaagcactcgaccagaagacctcgaatctcatccaagccagccttaacaccaaagcatcaaactggaatctgaagtccaggaagtaagatcggggtaatccgcgcaagagggcacgatgtggagcctccggtgccatctccgggccaagttcctctatatcacctagtaaggaaccaagaagatcgagttggtcgcagacttcaaaacatttgtcctaattctccgggctgaagccaacatgttgtagagtgtgtatgatgctctttaaaatggttgtgaaggtttcatgtgcctagttgaagcgctgttcaaggtcttggggatcttcggatgaattgatctttgggaggagaagagaggtgttacccccaaggtccttgctatgtggtatgggtaaattttgtagcgacaagtcaagaatgtagatatcaatggatcagtagggaattgttccaataacgacagctcttaattgtaggtggtactgagactatttaagcccatccagccagctttctcacattaagaaagacaatgattgaaaacatggaaatcaacagaactcagatgataggatctctctttcctgcctctatcctttggtcaaagccttgggtagaggtgtaaaggaagaaatacattgtttttgctagtaatttttaaataccacagacaaagggagaaaattgaaagagattttacatggaaacgattgaggtatcatgcatccatggatgcatggatggtatattgggttatgagcaaatcaacgctaaaagagcacaaattggatatcaaaagttcatcaatcatcaatcacaacatatcgttgtctcctccaatttccgtatctcttcctgcacgtcatctattcccactgtgacaaccatccaatcacataagaacttgcccagtcccgcaccaatgaagatgcaaataatcacatagacattgaagtacatggccaacaacatggtgatataagcccccgcaaacgtgactgcatgaatcacagccctcgtcaattgttgtaacggcgtcgcgcgaaatgtcacggcggttctggcagattcaaatctcctgacaaacgtgccgtgtagggcttggcgctcaaattggcgggtcaggaagttgtcatattcccgaccaatgcgccgacagaactcgactaacacgaccagcagaattgtgccaatacaggttgcggcaaacatgccattgttcttgatctgccatcctgcggacaggaaacaggcatcgatggtgtcgaaattgaacatcatctggctttggtcagcgaatccacttgaaaggtgccaaggtccaaatatcttggcactcaccgaaaccttgcagctgctcgagctggtgctggaatccatgccctccatcttggccggtcttctgggtatgcgaggatgagaagttgaaaatatggcgcgtccgatatcagctcgatgccgctgttcttataacctggtggcttctccccacctacgctgaggcaaagtggagaaacccagcgatggcgtgggagaaatgtgctcaaatcgccgcaaatgcgaaaatggccgcgttgaacttggaagttgggattcgcgtaatggcaatgaataaaacctcgtgggtttctcgcacagaatctcataatctctttcgcgcttcgccatgaccagataatcccgaccggacgcagaattaggtgttcttttatcaactcgaactcgagctgaattgtcgctctacactcattggaactgggctgaggctcataatcggtcttcaacatcggcctactgcatagggcagctcaagacataatgtcgtttccaaaattggatgctcgccacatccagaacatgagcgcggcgacatcattagagcctcattggggatactacgatcgcgcccttccctgcaccaacgatgcgggatcgtgcgcgtacctcgacgatgtatacgcatcacatgaccggggaatgctatattcaggcattatgtggtgtgtcattggcacaattttgctcctctgggtcgtcctgaaccagttcaatacgccaacgatatcaccagcactagcagcaccagaactagccggactatacaaggtccgccgctctgttgcctcattagccaggaaatatctcctgcctgatgcggctcggctcatcttcggccgcacaacacgcctccaagtgctcaccctcgctctgttagctggctacctcctcatattcagctttgtcggtattctctacaacacatgggtcacgcccgtctcgaagatgcccggtgtatataatacccgcaacagcatcggcccgtggtcagaccgcgtcggcacactggcctacgccctcaccccgctctccgtgctgctaagcagccgagagtctttcctctccctcatcaccggcctgccataccagagcttcaactttctccatcgctggctgggctatattatcttcctgcaaagctccctgcacacaatcggctggtgcgtcgtcgagctgagattgtaccagccgcaacccaccgtcggaattgaatggatcacccaaacatacatgatctggggtgtcgtcgccatgatcttgatgttcttactcgtcgtgctgagcacaccgtggggaatcagactcaccggctacgagaccttccgcaaactgcactacatcctcgctatggtctacattggcgcctgctgggcccactggaagcagctcaagtgcttcatgtggccctcgctgatcttctggttcctcgatcgcggtgctcgactcgttcgcacaggcctgctacactaccaccccaaccactcgggtagtctcgggctcggcttcaagcccgccgatgcgaccatcacccgcttcccggacaccgaacacggagatgtcatccgcctcgacctgcacaataaccaggacccctggtccatcggcgaacactactacctaacctttgcgaagtgtagtatctggcaatcccaccccttcacaccactcaacctccccgtcgtgtcgaagggtacagtccaacactcatacatactccgagcgaaaagcggagaaacgaaaaaggttgccgacctcgcggccaccggcacacctacaacacctgtcatcttgaccggcgcatacggcgagtctatcaccagtcacttgacaccaagcaccaatataatttgcgtggccggcgggaccggcatcacctatgtcctccccgttctgctagatcttgcccgccaaaaaccctcaccggaccgcaaggtcgagctcatctgggcagtccgccacacggcgaatacagagtggatcgcagcagagctggatctcttgcagaaagcgcggaatatgttgaacctcgagattcgcatttttgctacccgagactcgaggagcaagactccctcgatcgagaactcggattccgaaaactgtaatctctcggtcccgaatattgaggagaaggccgtgcaggtctcgccttccaagtctgtttctgcgtgctgtggatgtgataaacctactgctgtggagcggctcgggggtgcctcggatgatgtcaatagacatccggatcttccacggctggtcgatgatttcttggttgatacggtgcgcggcccgacgagtgtcttcgctagtggacctggtggtatgattagtgacctgcgggatattgttgcgtcctgtaactccggtgagaaggtctggaggggccaggagagatttgatgttagtcttatctgtgatgatcggttggagtggtgaataggatgcgaggagaggggagttgtatatattgcccaggtggctgtattcgccaaatatggaatcatcataagttgtggattcaatgtacatatcatcatgacgaattttatggatcatctatcaacagaaatatgggagtgtagaacaagtacaagggtacaagggtcacaggttttgttaatatctcttcgtggctgtccgagtctacgaggaatatgcgtccactacctagatgtaacgaatatgaggtggagtgagtaagaggatcgaggatcttctcttcctatgcctcgatgatagagtcatatggcttagatgcagagatagaccgcgcaataatagagatatgttaaagtcataaaaaaaggaaagacctatgcctacggttttgatcataaattggaacctaggggacatatccttccaaaaatggaaggtggatccatgtcacgtatggatgcctaaacatgccttgatcctaacaatggtactatggcaactatcaaaaatatctctactttgtctgcccgttgacaatagcatcccgcttaagctcaccactaggcaaaagcatcccagatcgatcaatgaacgaccgcgctcgaatataagggtccaatttccaatagttcacgcagaactcatcaataacagcattccgtcgcgacttgagctcctccgctttcgacaccttgtccttcccgtcagactgtgagctggcagagacccacgctgctgtcgcagagatcatccggattccaatcatcatacggtcgtacattagtgagtcgcgcgttgcggtgtctttcatgactgcattctcgtctttcacgggctcgtcgtatttataggtccatttttcgtcaccggagaactctttggggatcttgctgcgcggaataaacttgtccaggtcggcaattgaccgcgtgaaatgcacctttgatgcgacgacggggtccatccagccgtgaatgagtttccagatgcctaaggtgatagctattgtgagtattcattgtaatgagaaaggaggatttcttaatggaatcattcgacttaccggagaaaatccagggtgcattatggatgagcagttgccccagagactcggggtagtttgcttcgaagcatctgaggatgaacttgactggtgggtattcctattgcgaatattaacacaaggcagtcatctcatctagcctcagtacggtatcataccatgttagataacccgaatcctgtcaaatcgaagacaattgtctgtgaatgtgtcagctgagtcaatatctcacttttggtcgaacatacgcccgtttcaaccggaggagccaagataagtcgcgtcgcctcaataacatgaacaatatatcgctcaagagcttcctcactctgagcacctggcttgtgaatcttcactctagcatagataacaggtcgaccgtccctgtccaagccatgaaggaagctttttcccatcttgagttggttgataaagtcggcaccttccttcttctcctttgacgtagttttggcactacgggattgctccagagcatattcctctccccggggcagaatttcttcatcaacctccatctcctttctccatagaatgttcgacgccatcatcgaaaatgcctttccgacatcccatttcctggcgcgcaagaaccggagcaacaaactatccgggttttcttgcttgatcattttcaatatcgcgaaacacatttctcgaggcgtcatcttagagaggatatgctccatagacttgatctctgcatcttgcacgcccagctgtcggagttgcgagaaaaggaaagaaaagtgcgccggagtgacctttcggttggccatttccgaaatgatggtgtctttggcattttcattcatgagcgagtccaccttgtccagtgatttctgctctttattgtcggagtaatttccagttgtgagttctccatttgtttcgctattcgatcccgctagtgcgatttcatatgaggtctcttcattggtatcttcgtccttcaatgcgctaataatagcttccaccgttggctcattgatcttatccagagcagcaaacagcttgctggaggagtccttcggaatcggtatgtcatatacagccgacagaacagttgcaatagaggtcagaatgatgatccaaaattcaattacccttgcttcctggtcaggagtgaggtggccgaggtgcccggacataaggtcaggagtaggagacatggcgtgaattgtgggtagagggtgaagtgtaatgccgactgggggaaatcagttcgtattttgctcgcaagcccgccgacggggtcttgttcaatcattcattgttaacggggccacatgaatagcagggatgcctcggcgaccttcggattcacgggcgaattcaaaattgatacctcggtgtttgaacccagtcgatcgtttattgagaaataggtgctaggacctttaccttctcgtgggggatcttgaaacagctccgatggaacggacgccctgtgagggagcctggcgatgacgatcctccatattgggggaagatcgtcgcctctagggagttcgatccctctcgattttgacctcgaatacgtaggtgcgcggatatttggggacgatgattctagtttcaccacatttacatatgaatttaatctaaaccagctacgtattcggtaagtgagctgcgtatgtaagccaagatatatgttcctggagttcagctaaagagaccttggaaagattcgtgttctaggacaagaacatatttaagagataatcatgagcagcgtcgaaaccagccttgtccgaatacttagcggcatgagtacaaaaccttcaatgacgatatcgagatcttcctgcgtcgccgaaggatctccccccccccccccccccccccccccccccgccgccccccccactctcggtcgtatcatcaacgtcactggtgaccccattgacgagcgtggtcccgtcaaggccaccaagttcgctcccatccacgccgatgctcccgcgcctgcgtgtcccgcagtccgttcccgattcctccgtttcaatccagtaatcacgcccggcattaaatcttcgtagtaagcccccacccaatgggcggcctactcaaaatcgctcgcttgggcaccttaccctcttgatagcgaataaccttacccagtaagtgaagtgcccgatctctgtcatctcgctgcgattgatacttaaactgcagagaagtgattgggctaacagcttctctagtgctaactagtgtcctcctcataccggctctaacggtggttcccagctgagtgctcggtatcagtaccctgtgcagtcagccccgatcccttccagcggaggtccgacatcccatagagatggcggatccgtccaaatggtaaaagacgttttattgagtgatgacgatcatcttcttctttgaagcctgatcttcaggtgcgtactcgataatgactaggttgattaccacgtgacctgtcgctccgtaaatgttttgctcctcgatggttttactcccctctacatatccctagggttttgtaaagcctctttttccgatagttctatttgcctttgtaacatatttttgatcatcttgcaaaatgccaaagaaacagccacgtgcaaacatattttgccattctgagttcgatttactttccgttttatcccttgcaaaaagtatacgtgggaaaccttgcttttgcgatgaatctcaacatccgaaaagtggcagtttgaattgggctatatctatatattttgaagatggtattgaatgaatattccgttctcctcgcaaagactattgtatgcttcaggaggagaatacaagcacattccttgcaagcgaggcggcaacgctaagttatttacgcgacaaaagtgatattcccgtcccagaagtgttttcgttctggtaatacctgcctacttgagatttgctgattgaattgtgtattcggcttacaattgaacagtccgacgcatcagaatgatattggcgttccctatatcttgatgagcaaagcacatgcgaaaccgcttgcttcttccggctgggataacaatgttgatttggatgaaggcgcttgaccacgtttgacgctacagcagaagcgaaaggtcataagaaaattgggcaaaatccacgcatccctttcgaacatacgatttgatcgaatcggatcacttttgcgggtagaagacgattatactctaggaaagtgtctttctccagcccttatgtggcatggccgcgatgggtttgatgaagaccatatcccactcaggccgtttgacgacgcagcatcattctacagagcgcagaccttcgctttgcttactcatgtcagagaacttcctatgtagcaccatatgttccatgcaccggtacctacacaacaggaatacgatacgttcagtgaatatcatattgctactgataggtggaatgactacgttaccgtgggggcaaaaatcgagagcgcaaaaaataggctcggctatacctcggctgcgcttgctattttggaacttgttcccttgctagcagaaagagacgatcaaattctgagctctggcttcccattgtttcatcccgacctaagtaccagcaatttgttcgtcgatgacgatatgaatgtgacttgtctaattgattgggcttgcacttcatctgttccaaagtcaatgttactcgtttgtcctggactacctcattcccggaatccaacacccctcgagtttgtagactctttcgcacaaggttttgtttaagggaaaggtttcgatgcccaaacagctcttcttttcgagaaaagcaaggatctttgggaatttgctcgcttagttaatatggattctattcaagattttaatcacctctcggagcttttccaatcccttgcccctggacaggagctttttgcaaagctgaatgacatgaaggaacgggatgagtttatcacctcgttgaaaatgatatcccaatacaccgccacacctgaggaaatgcggaatgagaaacagtattttgaatgtaacggacccgagagattggcgctggcacgccatatctcaacaacggcaagtcttgatcctaagtttgtggcagatcagcgtctctggaagtgggtcgtgatatacttgaagcagcgagacacatatgttccctggccttgagaaagaagttaattgaaaggtgtggaactacgcaaataccgtctcttactaggtgtgacgcttaaaattgtgttgtcgcgagaaggataccatagctcgcgacgtcttgtttgataatgtcttgatttctttctccgcattcctaacttcacgaatataatgtacaatcgaaaaccaagcggccaaggcctatgatatgagaacaccagcaagggctcctaaaagaacaactggcactataaaagagcagcagagtccgaggagaggtgtttcagaactaagttcctcctcgatttccgctcgtgggtatgatatttccttctccgtggtgagcaatctagagtctctggggtgataggccggagagttgaaaagatgagcaatgggtacccaattgtggacaattgtcaagaagcacaagtgcagcaatggtggccatgcaaatgtagtgagcagtttaggaatttctgttccatctccggtcacagccacccagatcgcaaagagcatagctccaacagtcgcaataaaaagacaaatgttcaacaaagcaccgctttgaagagtatctctgtatgccttttggaacgacgaaatggatgtagcattttcgctcgaattggcggtgcttccggtgacaaaagatccctttggcttgcttccgaataggtggaatcgtgcaatggcgtacagatgggctattaacacaacatgttaggatcaagtttcaggttccattagatatgtggaaagttttaactcagacttaccagtagaaagccaactgttctctgcatgtgcaaaaggcgcaaatggaacacccgcgtgtgcactccgagcccagtcatatgcccatgtggacgcaacatgcacgatggctaaaacaagctgaatcttcacctccaacgccgacccagcaggaataaacccaccatcggagaccagaaggaaaggcagagcaacaaatccgatcgagtaggtcacaagacctgccatgatagacagtcccccaagagcaatatcccaacgcagatgctctggaatcgccttgttgacagaagggagcaacacagaaatctgctgagagtgtccgatatgccaccgattccgctgtttgagatgtcccgcgagagaagtaggaacgaggccgaattgcaaaacctcttgtacctgcatcgtgcgctttcccagccctcgtaaaatcaacgatagctgccaatcttccgagaaagaataggtcggatatccacctgcgtcgagaatcgcgtcgcgacggaagactgcgcctgaacctgcgtctagcgcatgaccgagaagatcgagttctgtattctcacacgtgtagaagtaagcccgcgactgggagaggggatcgccacagggcagattatagaaatactgtcgcgtggtcagtaatgctgcctttgggtcttcaagtagatggggcagtgtcgcgcgcagaaactccggcatcaggatggagtctgcatcgacgactgtgcagaactctggcgggtcttcggtttgcagggagaatagggcgtagttaagatttcctgctttggcgaaggattgcccggattgcttgccgcgggtgtgataggataggtgagtccattttgtggcgagttttgcaattgcgtcgtgcaagtcagttgacgctccatcatccagaaggcggactcgaaaccgggaagctgggtagtctaaaccacatgctgctcggaccgtgtccaggatgatttcgactggctctccgcagcatgttactagcacatcgactctgggcaggttttcgttgctgcgtagtctcttgcggagtgtctgatgtggtggctttgtcgttgcggctagcgataagcgttggtggtttagggaaatatctaagaagatcagcggatgctcatcgttctttcttggaaggtaacgtacgagcaaatagaccctcaactccgagcattaaccacctttgccatgtttgctctgggctcatcacggtgaaaaatagccgcactgtaaagtagatgtaggtggtccatattgctgcttgcgctatacggcggagatatttccgatacttctgcgcatacagagcgcgatcatcaggggaaagctcctcgatgtcatagacgttgttaggaaacattgaagcgaacttgaagccgtcggtttgtgccgttgtgattctgttgcatattatacagatgattttctttttgcgctttttgactggggatatcaagaataccacgaaacaatttgtcttggaattttcacaaattgaccctaggcttttgaaggaaagccttctccgccgaaattaaggggtttgaatgcattcagggctccccatttgcttctggaacatactgtgtctatttatactactccgtatccacctggagactatcgctgccgagaaccaatcagtgcaccccatggtatggattttgatggcgctagccttaattggccgtaaactgcaagtgggccatttcctcagcatccgattggatccctattctataaaattctgagatagccggggactcgctatgaatatactgtctgaggtaccaacagtgatctgattcggtcggtcttgtcaatagaaaaagacgaatatagaatcccaaactgtcacaagtgataaaagtacggctgatcaagggcagatgacccgggtagcacgtagccggtagcctggcggtatctctttgtgatgatggcatcctccttggttgccacaccgtatcgttcaacattccgatacggtgcgatcaaatatcccccgcggagagctggaacccgaggtgacgactcgacacaagcaaaatgttgcgaactgaaggtctcatcacctcggtatcccagtcgcacttgacttggccgaagagagcattcatctaacgaacatatttgcgatcaaggtcttatccccgaatgtaatcattgattcttcacgagactcttcagagaactggttctcacaggtatttgcaaatttaatatgaccaaggctcaaccgatcgaccatccgtcttatcaatgcgggcagctccaaatggcccagcgcagttcgagccattgcatgtgcctcttgtgatttattaagaatatatgttgcctgagggtatcataaattagcacatgcttaagcaggcaaccttcggtgaacatatagttgtagactgagcattaattcaacatcaacatcggtagatacaagtgtttactctactaccaaataagaaaaaggaaaaagcaggaacttattagtatcgagagagatgtatatgaaactataaaaaaagaaacaccgtaacaacgaaacaacgaaagggctgataactcccatgccagtaccctatgcctaggccacgccagcgcatataggttggaatgtgtatgtttatatttcgcggactgagcagatcgaacgccggcagccggggttacctgcatgttgaatccgtgtgagcccactcagccactgcggggactcccggttaggaggaaggtattgctgtgaaatatatcggaacatatgcttccgaaaagggaaggtgggccctcacgggttgatgcctgaatataatgtttctgcctgcagatcacacacacacttattagtattagaatgtacatatgtcctgccacaggaagaaagataaaagcaggagttaatgggtgaaaaacaaaaaaaaggatgaaaggggtgatactcccatgccagtaccgccacgcccaacccaacggcttaggaacgcatatgtagaatatttataatcgtgggctgaacgccgacagctggggttacctgcatgcttaatacgtatgaagccactcagccactggggggcggaatttcgaagaacaggtgttggtcctaaatttataggaacctggagggcatgtccttcctaaattggaaggtgggtccatacacctcatatctttcgttcttgatgttcctgcatttgtgacctggttctcgccgatcgaaagaaggggacaggcgttattgaagaagaagatgtataagaaggccgcggggctgcttcatggatctatagagagaatccaaagatttcccgagaccttgaaaccttctgtcgtcgtagtccaatagagttctgtattttacaaaaagaagagcgttcttttggtctgttcacccacatacataatatatagaatggtggcagaccaccaagatacggatggtgaaccggcatgcattttgggaggcttctcctgttaggccttatcataattaaattcatgaatattttaacaatcatttggcattatcggggtatcatacttcctttccaattcagatcaaaagtagtatcaaaatccatagattagacatgtgatcggctcgatcggaaccccgcccgatacagacggaacggaatcaatgcgagtcgcgattcatagatagataaagaaagccctgggattcgcacagaaagatgaaaaggaataatttaccatttgaatagcacataatatcacatttgtccatcatttgccattcctgaccaagaatcgttggtcattttcgaaatgacctcaaacaacccctcataccttattattggcgcaggtgtctttggggtatcaaccgcctatcacctcatccagaagtatcccaatgcgtcggtgactctggttgatcgagacgcatatgatgccgagtcgcgtgtggctgcctcatgggattggaacaaggttattcgcgccgattacgacgacaaggtctactgtagacttgctcttgaggctcaagaaatcttcaaaaatgaccctctttggcagccatacttccatcaaactggcgtttactgggcgtgccgcagcgactacgcgcaaactgtcatcacaaaccataaggaactcggtcgcaatgacgatatcattgctctccctgtttctgaagctagaaagctttatggaggaatctttgacaatgctgattacaccggtgttaaagaggttctggtgaacagagctagtggctgggctgctgccggcgatgctcttcgagcagtgacaaagaggtgcttagaattgggcgtctcgtacgtcaccgcatccgttactagccttgaattcgatgggcatggctcctgcactggtgtgaagacacaatctggagagacattgtcggccacgcatgttatcgtcgctgctggggctttcacgccgactttgctagagtggagtgctgtgaagagcggcaacgctggactacgagctggagagcgaattcttgcggctggtattacgaccggaatggcacaactgaacgaggaacaatacgaaaagtacaaagacatgcctgttggcttccagggctacacaccgaatgaaggtacgctttccgatatattcgtacgaatgccactaatcattcccaggaaaacccttcattggcagcattccccctaccaaagaccgagagctcaagtggtggggatctaagattttcacaaacactcgagaggtagtccctgggcattacctctcttctcctccacccacgaatgactacaaccagtggaaggttccaggacctctcaagcaggatatcgtagaggccaggaatctgtggtatgggcccgaaagtgcaacatggcagatgacaaagcaccggatttgctggttagtgcccctgacaacacattgattgattttctaacactcgaaagggacgctttcaccacttcctcggactttatcatttcgcctcactctgcctctaaaggactatacgtcgccacttgtggttcattccatggatacaagtttttccccgtacttggcaagtatatcacacagatgcttgagggagaattggcgcccgaattgatagaaaagtgggcatgggatcggcagcggcctgactcgtccgacaacgtggagtacccaaactctgagatgaaacatttactgggacctacagcgaagctatagaggaaattggataggcattgaccagcgcgcttgctggggatcaccaaaactccattatgatacgcttgataagacatgatatgattttcattgacgttctgaataactacttaatatcataacgactgtttgacattaggtttacagctgatctagaagattcctcttgcataatatccgttaatggcaattaagagattagtacatggagcttattgtatattgagtcttacaaactcggctgctggggtaaagtttacatcctcgctaccccttgctgcggaacagcccgccaccgtttcgggccaacacatccgagagggaaaatctgccccgagcgctgaaagagtcgcttgcacaggagcttcaagccaaaatacttacccatggcaacctaaatcaatccaaaatcgtgattcagggcgggaaaatcccagggatcattgactggggtgctgcgggttctagtactttgccctgcgatggccagccctcgatccagagtggcgcgaactctcttcatatatcctaccgccaggtgaatatgaatattcgaaaaatatcgactgctgcgtgtatggcaacactccatatttccacctagcgtgagaggaaataagcttaaacttcagagtttgatccacggagttccattgggccctgtcggagacattacctaatcatttgtatgggccgatggatcccgaggtcgggttatcggcacccaattcaaccgggtggatgccattcggcgacttttgatatcattttacagggccatgtcgctgaatatcctgatgaatggatctatgtgtcaaagtgggattgtttctagggtggagcgttaaatttcttggatatttcgcaacttgtttgcctccagaatcagatgataaggcacatcaaaagtttccgatgataaatcaatcctcaacttccccactgtagatcagtacataaatcaagccacccccccccctgcagaatggaattgttcacacatataataaatatattcaataattcatacctagcatcatcaaaatgacctggcctgatgtctccgttaagcccgccgagggcatctcatacttcacccctgcccagagtcccccggcaggcacagctcgcaaccctcaaacgagcggaaagcccattcccaagctgttcgagcctatcaccatcagaggagtgactttccacaatcgccttggtgtatgcaattcccccaattccttccataatcgcacagctaacaataaccctccagttggcgcccatgtgccaatacagtgccgaggatggccacatgaccccctggcacatggcccactacggcggcattgcccagcgcggaccaggaaacctggtcatcgaagccaccagtgttgtccccgaaggccgcatcacccccggctgcctaggcctctggaaggactcgcagatcgcgccgttcaagcaggtcgttgagtttgcacacagccaaggccagaaaatcggtgtccaactcgcacacgccggccgtaaggcctcgactgtggccccttggcttggcggcgttatcgcgaacaactctgtcggcggttggaccgataacctcaaggctcccagcgccatccccttcaatgagggcgatcccatccccattgccatgacccaggacgatatcgccgaggtcaagactgcctgggttgctgctgtcaagcgtgctcttgctgctggttgtgatttcatcgagatccacaacgctcatggttacctcctctcctcgttcctcagcgcctcctccaaccaccgcaccgataactacggtggcagcttcgagaaccgcattcgtctctccttggagatcgcacagttgacccgtgacactgtcggtgaggacgtgcccgtcttcctgcgtatctcggctaccgactggcttgagaacagcatgccggatgagaagggctggaagcttgaggacacggttgagtttgctcgtgcacttgctgcgcagggcgctgtcgatctgatcgatatcagtactggtggtattcactctgctcagaaggttgcctctggtcctgctttccaggtccctcacgctatagctgtcaagaaggctgttggggataagatgcttgtttctgctgttggtatgatcaacaacggaaaattggcagagaagattttgaacgaggatgacattgacgtcatttttgttggtcgtgccttccagcgggataccggtctcacttggcagtttgctaaggacttggatgttgagattgccatggctggacagattcgctggggtttcactagcttccgcaatgcgtccgagtatattcagcctaactctatgaaggcttgtatttttgattagatatagatacaccggctgttgactttaccggcttgtggccggcttgcattgcattcactatagatatgccatttttttttaacaacaagaacaatgagaattgatatgtttcttcatgagacctgtgattgattagaagtatgagaaatttacttcagaaacgtcacgcatattggcttcgtctctctcaattttcttggtggtccttttcgttgccgcctgttcgttgtcttacgtattcaactacaacaaagattgttccaactaaaactaaacatggaaggctaccaagaagaagcgaggatatgtgaaacgttttgattgaattctaactagtctaagagcaattgtgtttggttatctttcattgggaacatgtggcaaagagcgatctgtttcgatgggacctgatgacatctggagctccagcgctatgaccccttcagcgtacatcgaaaaccagttatatggttctcaacggacgctgaagaggccataaaactgcagatccggacaatcgcctaggtattcaccaagggaagatgagaagtgatcccctattcagagcagccatggtctcaacaaaaagaaaatccccctgggagaacccaggggatatagaataaaaaaacgctacgtcactgcttcactgaacactcgcccgaaggtcgcgacccctcgagggaggtccagttcagcaggtcggccacgtacccgccaggctttcaacaaacggttgcgacccgtgatgcatcagccgtgctagaaggatttcttgcccgcttcctgaagcgctggactcggagccaagtccagacaggttcagagttccacataaagtgacctgcaggcgtaccttgactcgcgccgtgctcgcttgggcatcggaaacacatgatgtttcgcaagcggttccataaaggggccgttgcggctgctcctctggtgtctcgcgttgctactccaacgaagcgaaagaaatgttgatttttgcttcaacttaggtttgttcggcacaaagaacaccctcaacagatgtcagcaggattgaaccaatataggtactgatcctccccatgccttccatcatacagtcccgctggaaatcccgctgtcctcccaaaggggcctgcaggtttggccagttaaagactgcaggagttgtagcgatggcctcccataaatcccgtcgcatcgactctgatcaacgatttcattggattggaacgcaggttttacccctgatccgcaccataatctcaaaacgatactcgggtcgtaagagttgacgctttatgtactagacaaatctgagcacagtaaagcccggtggatcgatcttgagaaacagcttcgaattccctccccaatcacgccgcatgcagagcgagcgccatggcttcccgaaggcgtgctgccgggacgtcgcaagaagggccaattagggagttgttcgaggcatgtgactcgaagaaagaaaccccccctcatggggccaccagatccacaagaggtgcctatagtcccaaccaatgatacagcgccccgaatatctcacgctaagttcgagagtttcgagtgagtcttgaatggaacctttcgacaatgggacaccaatagcactgatcagaagaccagtgatcccatcataagacgtccaccggcaggtattccaacgagtctcggtcgggcaggacaaccgagatcaaggaggtacccttcgacgaacgtcctatcccaatcagcacagggctgttcataacggaatgggtgagagaactcctctatgcaggtgcaaagtgccgatgaggagactcaatgacccgctgcttgggggacaaggccaagcaggcacggttaggagaactctagagagaggaagtaggggattgggaggagtttatattcgcccgtggatgcgtcccgagatttcgcgcctttgtcgattacctaagcattgccccactccagcgcgtcccgacgcgtcgcgacacgtcgaaactaacttttaaggcttttctcacattcatcgtcatatcgatcctttctgttccgatttttttagtcattgatagtggacaagctccacaaaaagacctacactgcaagtacggagtagtctacagagtatatttcaggaaggcgtataatctttgctatgttttttgccctaggttgctggttatcagtgtccggtcagagtaattcttatttttcggtgtatgtgatagggaccaaaagtctcagggaaaagagcgaacacagtgcttgccaggattttcgtaagtcttctgactttcgcgaacgtccggcgtcagatattatcattattccacctccaaacaagaaacatttactttctgggaatttaaacagctcacggcaaaacctccttccccatccaatcccaacacctccctctccctcctttagcctcgggtgataaccccacaagcacctccaacagcttgtcggctgcatcggccggctccagcatttccctcgttccccaataatccttggtgaactccgtgtgcacagtcccagggtgcaaggccacagcaattgccctttccgcactcttcgtgcgcaaatacaaatcaaaagtcttggccaattggaatacagctgccttacttgcacggtaggaataccatccgcccgatgcattgtcggatattgagccgactcgggcagccatcattgcataaatggcatgcgagggcagcccgagcggcccttgggaattgattgcagagctaacctctattgtcgggaatttcggtgcggatcgcaatggaacgaattgggaaagatgcttcaggagtagcaacgggccgagggaattgactttgaagctctccagcgcattggcagcatcgatttggctaggcgatttttccgcatgtaaaatgccggggattgtcaatccgagcctgagtggtgtgttcgggtatttctggcggattgtgtctgccattgctgatatcgtagactcatctaggaagtcgattagcgttctgatgcagagaagaatttattttcgaagaattaagttgctttttcttacctgttacatcaacttggagaatacggagcctctgttccgcgtcttttggcatacccttgcttgccagcagtcgttctttaagttcatcgcagttcttgcgggctgttgcgatcaccgggagctctgtccgtgtcaggagctgctgtgcgaaggcgaaccccaatcctcgcgaggcaggggttactagcgcgaatccatgagctgccgataacataacttatttgctgaactagtttcgctgatggtatatgttttagtggtgagggatagtggaaacaattatagcaaggagttgctagttaatgttcagcgtatatgtgacgtcacaaatcacaggtcatcgatttaagcttcgatctgatctacatcgtgaggctacaatgggtctaatttaaaacaataatcgacatgtgtatactcagtatttatgacttgttttagattcactctttatctcccaacaccctcacaatctatctcagttctttccctccagaccaacaaagcactctctgccaaactcgttgctgctatcattgaaacggaatttcctgttgagtttctcaatcttcttcatgtcttctgggctcagcttgaaatcccctcccagattggccctgatcctcacaggtgttttagacttcgacagcaccgcgtgcccctgcgtgactgcccaggctgtcgaacaactgcagttagtatcatacagactaaatccatgcagattccacttaccaagagcaacctgagagggggttttgttgtacggcttgcctatctccgccaacacaggctcatcgagcagatgggcggggcgcttcccagcatagagagagttctggtttccaaacggcgagtagtgcatgacaagtataccctgacttcgattccattcggtgaaatcatgctgctggagccacggatgacattccatctggtgcacagcgggaacgacggaagagttcttgatcaagtgctccatctcggacttgttaaagttcgagacgccgatcgccctcgccttgccggttttcagaagctgttccatcgctttgtacgtctgcttttgtgtcaacggctaaattcatagatcaagatatgagaatgctgcatacgtcggcaatgtcgatattcaccatgatcggcttcccatcctttaccggaaagagttcctcccctcgttcccaggccacaggccagtgaatcaggaacagatcaacgtagtccatgtctagatcgtccagggattgctgcatagccgatgccacgtcgtctgggtggtgcttgttgttccatagcttagttgtaatgaagagctcttcgcgtgggacaccgcttttcttgacgcctttgccgacagccttctcagttgcataactagtatacagtcagttctgtacattgagttcgccactcgtctcattcgggaagcaaagctgctcacacgcgtgcagtgtcgatgtgacggtatcctgccttgattgcttccgctacggcatcttcctgtgcatccgcatcctgccaggtgccgaatccaagggctgggacctcggctccggtgttcaacttgaattttgtgggcatcttagattgattgatttgaatgacgattcaacagttcatgttcggctctaatatagagcaactccaaagcacatccaaatcctgacatgattatcaaagacacgtcaaggtgacgaattcatgtttgtgcttgtccggggtgatgacatgaaaatgatgttttcgcagtctcagagtaccactgacgagcgaatgatacctagaatatcgccaaaggcgcgttcgtgttcatagtcatatggtttcaataccctgcaagtagcaatatattagcgctgactatgcatctatccattaacgtcttgcccaccttgatttctctccgactcatcacgagcacgaaccttgacgatggatcagtctatgaccttctcccacccacaaagcaatcacgctggcatcttacggcttctgacatctccgacagccacttaattatccagaattacaaccgccaacgtcatcataaacaatacggagtacttcttcccaaatcatttcggtctcggcacgctcctttgcatcggagccctctgcgccatatccaccatatccaccatctcatattcaagaatccttctcatatcaatcctcacgacgatcaaaattacttccagctgaaaacgaattccttcatcatcgcgtcgttcctggacgaaccaccccgcagatcccaagcaaagatggaaagtacggccctgagccagggaagggctcagtggtagtgttccacccttagatacaatacgaccaccgccaatcttcgcaccgcatatgctcgaaactacaacagattatattctagaagaaggatgagctcggcctgctggctgttcagattggcgaagcacggaacgcagtcctaacaacaccagatttataaagtatctctctaaagaggtggaaagtattcataaatttgcccacttaccgctacgtaaggagatttgggtgtactataaccagcataaccctgggcatgtggatgtctttcatgagacgttgatcacgaaagatggtttatgaacatggatgcaaattgccatccaactgctcggaagaggcgaggttaagggtaacagtcacaaagacaacacagacacctgcatggggacacttgccagtgctaatacaccgggtttgaagtcgttcaaagcaaggcttgataaagaggattagaacccgaggggaagtccctcctgcagctccaacagcaccattggaatgacttggtagaacagaacagtaatcatgcagtcagaatagggtcaatgacaacaagttgcgtagcttccaaaacacgagttacgtaggtctgcggacagagtaatgacccttatccactcagtagcccctttatgacgagccataccattatttttttgcttttccatttgtatctccgttttcagtctctggtatgggaattggccctcctggggagttctccagtctcgccgtcaaaacctcgacgcctgtttctgtgacaagcatagtatgttctatcaattttgatgttagtattgaaatccatctctaaaaggtctatgcgcaccaaattgggctgagcgtttgccgtccaccgtggcgtttgtccagtcatctggccaagtcatatctcggttggttcccagagtgaggataggttcgatcgtgaatgtcatcccgggtttgcatgttcccacggccttattcttcgcgtagtggggaatccaaggaggagggtggaattccgagttgataccgtggccaccccaagtcttaataacggcaaggcccctagaggctgcgtgtttctcaatgatcttaccgaactctcgaatcggtacacctggcttaattatcgcgatagccatatccaaggcctcacgggtcgtttcaacaagcctgatcgattccggatcctttttatcaccaacatagtaggtctcgttcaagtcggcatgatatccaccatggtatagagaaacgtcgaggttaagaatgtcgccatcaagaagaactcggtgatcggggatgccgtggcatacaacttcattcggagatgtacataccgacttaggaaagtggttgtagttaagtggagaaggatatgactgccttacgctttagcgaacaatttgataagttcacataggagtaaatatcactcacctctcgctcaacgcaagcattatggcaaatttcatccaggtaatctgtggtcacgccgggccttatcgccgcagcagttatatcgagtacttctcgagctaacctacacaccttacgcatggcgtcctggccctttgcatccaacaggtcccattttgacctactcaggcgcatctcacgctttggaatgccagtcacggcccagtcgggatgcttgattgttttaggcactggtcgtcgcggggagagtggatatacgggtctgacagagcccgtgaacgggtatgtcggaaaggggtcgtaaactccgctagctatatcgcgattagagaatacagtcacgagtaacttggaggtagttaccattttgtatcttatgcaccgccttgtgtgtggtctagatacggatcaatgttaggttctcggtaagaagaggtccgcgtggacgtaacctacccaatttctcttgaagcagtcttgagcgcagaagtaactacctttgatgcccagctttagacacgttgggcattgcaaggtcccagcttcattgtcgcaatcggccccagagcacgtcccatgatcggacattgttgcgaagtgaaattcgaccttgggtgggccataagagatgggaggagagttgtgtggaaatgcgcgaaagatttggccaggctaatgtacctgaatagaccgccttttatactccgtactgtcttcctattaaatatactgccgacctcaacacgctaggtcgtactccgtataggaattttaaaccggcgtagctggcaggtttcaaaaggcggtcaatttaggtacgttccttggacccaatatttcggaggtcccagtggcacccattatttcaacagtgtttacccccgctataggcccaatggcacagcttatcgagaacctgaaaatcggcggtaagagtcctagaatctgatgtttgacatacacatttagcgacagtataagctaatacctgcttttgactcacagatgctggagtcgacatccccgttctcgcccccgcagtaaacggaacttcaaaagaaacagaggattcggacgacgatgtcgctgaagataccccggcagtagctgttgagaacggcggtgccaaaaaaaaagaaaaacagaaagaagaggccaaagaagaaacaacagaaggttcagacggatccaccatcgattcccttatcgcagctattcccgaacaacacctaccccaagggcgaggaagttgagtataaagacgacaatcgatggcgaactaccaacgaggagaaacgacacctcgacaacctcaatggtgacttcctctctgattaccgtcaggcagctgaggcacatcgtcaggtccgtcagtgggcacagagaagcatcaagccaggtcaaacgctcctcgaaattgccaacggtattgaggatagtacgcgatatctggtgggtcatgatggcttaactgaaggtgactctttgatagccggtatgggatttcctaccggtttgaacatcgataacgttatcgcctattatagcctaaacgccggttgtaagactatacttacgtagagtaatatactgaaggtcgatatcggcatttatataggcggtcggattgtggacagcgcctttacaatagcattcgatcctatatatgataacctactcgcagtcgttaaggatgtaacgaataccggcatatgcgaagcgggtatcgacgtttgggtaggagaattaggcggctatattcaggaagcgatagaaagctacgagtgtgaaatcaacggtactacctacccaatcaaagcggttcgcaacttatgcggccatacaatccttccgtattctatttatggtactaagactgtcccctttatcaagtcggatgatatgacgaagatggaagaggggggcgtttttgctatcgaaacctttggtagtaccggtagcggccgatatgtcgaaggaggcgaggtctcacattatgccctgcgcggtaacgcgaacaccaaagacttgactttgtcttctgctagatctgtcttgggagctatcaagaaaaacttcagcacgatccctttctgccgacgctatttggaccggattggacaagagaagtatctcctaggtgtatgaacttccattacggatatgtgattggaaatcttgactaacaagaatatagctgaataatctagtgaaatccggaattgttgaagattatccccctctaaatgagaaacaagggacctatacggctcagtttgaacacgtaagtcatttggctctccatggctccagggctttctaaaagcagaataatcactaatgaatataagactattctactccgaccaaacgtcactgaggtcattagtcgcggagatgacttctaaacatattcgagttgatggttttatgtctcagggtgcattcaaatagttattgaaataactatcatgattagtatattgacctctccccttctacgcatgacgaatgcaaataaaactcccttggtgtttgtttcctccgtgctagtcatcttataaattaccacctgtttccggcgaaggatcgatctttgcttcagaagattttgagtttcggtgctgatactgcttggcagccggtaatttgcctacaatgaaatcaatttagatggctcctatagtcgcagatcatgtgatctctgaatagcttcatgttgacagataaggtgatccggtgatctctacatagtgttacagtacagttataagtcatgtgatgattgttaatttacacgataattgcggccagcggtagacttacctgaagtagtttagcggggagtgtgaaggattgtgtctgtatactaactccagggataagctcaacacctgaagcccaagctcttcagcttcttacaggcagttggtatactagtctatcgaggccaaattagcctcaaaagtcaccatacttgcatatggaagaactaagtggaaacattgccaagcagaccaagctgtttgatgccgagacaaacaacactaaaggtcacacgcgtctaccgtagcttaccgctttagtttatatagcgagctccacccgcaaatttttttctttccttctgcatcgcttggaattctccagctctcacttcttttgtttttttcttttgtcagcttggactgtgtttaatgatggcacatactccagctatattcatggcctgctaaggctgcgaataatgctcagtttcaatttttccaaaaggtaaggaaaatattcttctatccttctcaatcccaaaccccggggatgattatattatagacatgcaaaggcattcctcaatcagaagatccatgttgaatctgtcatacttttaagtttcagccttgtctgacccatcacaacattatcacctttataagccattcattgagtgatctttgactaacaatatttcgctcaggtaaattacactcggattatgtcccttccctccattgcggctgttgcctagcatgaagaaatttgaacgaacgggcggacataatgtacccatctccctgcatccaacaaaaacagagcgtacaaactctgtgggtgtatgggaagtggattacttgttgagaattcgtcacctgaaccattgcccttgtcacaattatttcattttgcatcgacaatttgagaccagtatttctaacagaaattctaggtaatttatcactcatctctttctgcccttctcaacatggtcaaacctatcatgatgaatgtgttattcacactgttggacttggaccttgtgtccgggaatgaacatttatacaaaaatctgatttaatgaggtatgtgttgcttgtcgattgaataaaaaacgtgtttcatgctgactgacttaaagcctgactttagttgccatgtcttgatttcacttttgcctcatgctttttgcttgaatgccaacgctgactcgacataagtgaacaaataggaatacccacaggtgaccatttggctcgttgaccgtgagtttattctccttccattccctgtctcattgcatgatgaaccccaatatactgttctatctctgaactatcatgtcgataaaatattttcaccttggagaactgatcttttccttgtctgccatcatttcactcaacttgtgatatgatcaattgctaatatgcattacaggagccatcggtcatttgtaatagcctaatatcaaataatgaattttctcttctgaacatctgaacactccgcgctccaaaactcccggctttcccttaaattctcgtagccactcgctaaccctttcctatacacttaacccccacgctcattggatgtccctactcgaaaaacaaaccatgcttcttgtgccattgctcaagactatcttcaccgtacacatcgtgcacactcttctttccctctggccaccgcgcccacgccggcttcgatccatccatgatgcacaccatctcgtcgggcaccggcaactcggtatcgattgcggaggcaaacggatgaatcagttcaggccagtggtggtcccaaagccacagcatggaactgcaattcgagcagaagttccgctcggaggagcaaagcttctcgtccggtgtgccgcgatctttgatcccagagtatttcctggcgatgacgttagtaaatatgcacttggtattatgggattataattctagtgtataacatgaaagtttctcgatgggtgttatggtcaaaagtgaaagtaggtggtgatataggtcttacttgatcagatctttgcccttgatgatattcaggctatcggcgatgccgccgaggttcaccgcaccgaggtatccgcctactttgcggcagatgctgcacgcgcatagctggtaaggaactggtgtatgggattgcagggtaaattcgacgccgccgcattggcagcttccttcgagattcctatggatccggttaatgtgcctgtgtcggggatgcaaggcagtactgatgaagcctcacgtacataggcatgatttggtgtgtttgtttgataggctttgagaagctagtgagtagtacgagtatatcaaatagatttttcgatagaaggttggatttttgtccagaattaggatgtggtactcgatatatatacttccatcgaggagagataacaggtttaacaacaaacccaacaaacagagcaaactgcacaggcctcgtatgatcaaaggccgtgtccaactctagacagcggattttccattaatagagctatatccgaatgcccgagtccaattccttaaacgccggattgatctctgcatcatcgacccttcctcgctactgtgattggctgaactactgtttgtcttgtttgtcttgtttgtctctcggaggtttcattcactttcgccgactgatactcatcttgctagctactttctcgtcagtaccaacgcagaatccttttctgttgatattttgagcggatatacgctctgtactttcggaaatgagtttcggagcccccggcggtgggtcggtgaactataagccatcaccgtgagttggattattccaatcgtgcatatctgtgcttgcaacatgttgtccagcgaatgaacgagatcggatctcttgctctgtataattgctgactcaatggaacggtttgcagacccgagcgcggtagctttcctcttgatcacgaaggtacgccagcccgcagtcatacggtccatatcccgaaggaactcggcaagaccagctaatccgatagagctaatcaaaatttgggacgctttaggggaatgcaagcacatcatctcaggatacctgaagtgtatcaagttgaacagaggcaccaacgacgaggcatgtcgcaaattggccaaggaataccttagctgccgaatggacaagtaggctaccccgatataccgaggaccaggcattgtcaatggatgaacaattgtttttgtgatgaatgtcggagcaaaatgctgactgagacaacttgactaggaacctcatggcgccggataacttcgagaacctcgggttggtgtttaaagatggcgcggggaaagcacagactccagttacaccagctacaggtgcaacaaacccagaacagaagagctgatataggactgcgagacgttggatgatattgtatgatatggaggagtggcgctattccgtgatattcaggtagtgctggcattattcaaggcgttgtatataagaaaatgtatttggtacctaatctaacacatggaataagtaaatatgacctgtgcagatgagaaagcatcgaaattcacaaaattatatcaatctgaaccgcggtggcctgttggctcgccctatgcggttccccgcatgtgaaaccgtttccgcccagccactcttacaatctccaacccatccgagtcccatgccaccaaatgtcatcgatcgcccgaccaccagatccctgcctcgtggcaatcatcctcattgtgcgctctcgaaccgggccccgcctcgtcttccactaccccccgaatcccctcagcgagaaccgcatcaaaaccactaccaggggtggacggcgcatttcgcgcaatcgcacgcgatctaagaataccgattcgagctcgagctccgagagcgactcgacctccgacgaagacgaagacgaacgagaaacccagagccatgctggtgggagttccttgctggcgggtcgccgcgctagcaacttcggcctcgatgatcatctccaggttgccacatcgcctgctgccggtgaaccccaacgacctgggtcgctaggctctgggcgtggttcatcggctcggaaacgggctgcgggcaccgatccggaccccgacgacgatgcggggacggcgtctgatcggcctgaagatgggagctctaggccgccctgggagtcgcttttgggtgtgcctgggagtgtgtgggagaaactacttagtccgtctcggtcgtggcataagcggcgctttgaggttgggattaatgatttggcgcttattggttggccggtttttgtgcgcgaggatggctcatggcgcaagcaaagacgcaagaagcagaagaagccccgtgctgaatgggacggaggggaattgggtcacaatgatagtgccgaggagggcaagaaggacgagcaatttgttatttcgcctgatttgagtgccagtgtcgcttcgattgcggagtcattggcatcaccgacaggcagtaagcgtgggtcgaccagtggacggcctgggaaaccggacgagtcgcttgatccggaggacaaagaccatatgacgatgttcaatgtggtgtttgttgtagatcctcctttgctggagtactccatgcgcgtgaaggaaatctacgagaatatcatcaagaaatttgccaaagctctcaaatgggaacaggctcgtactgactatgtgtggaaggagtctcaacatattctgcaagtcaggagaagagcacgagagacaagtatgctttctgctaatagccatccgccggagctaacaccctggatagaaacatcgacccataatctttactccgaattgatatcccagtcttctctagctcgagctatctacacagtctacagcagcatatcggcatccaaaatcgcttccgtatcgctcagcccagatgtctccatctcgctccagattccacctttgacctctacgtcatatcttactggtcctatggacaaagcatacccaggcttgtggctcacgacagcagacagtgcaacccccgccgacgacccaagtgtagatgaaagcagcacgccgcatcaggtcccagcaaagcactttgctctacttctcttagacagtgaagccgccattatcaaggatgtcgaagcatctgggggagcgcttgcccccgcacttgcgcattatatccgatgctccaagccaaccaagtcatttgcgcagatatcagtctcatccggaatcccactatcccatatccagatgctgtcgagtcatcttgtgtactggcgtcgtgctcgcgccatccctccaatccaccaacgagacacatacatcgtctctccaaactgtgacttgagcaagcttgaaatagctacgattgcttatcagacagctttcccaacataccctagtttgcccaaaatgctttccacgctcagtggcacccctcgcccttatagcaacttcatccccagcaaagaccacaaagagatatacttcactatcctggcctggctactgcgcggcggctgggtcacccagctccgcactttcgcgcgaatcaaggtctcacccgaggtcaaaatggccgtggagatggcgctgcgcaaggaggaagtagagcgatacttgtctaggggcaactcaaactcgatctcggtcgatgaggacagcgaccctgacagtgaaaatgacgatgcggactcttcctcgtcttcttccctcgacagccacggcagcggggatgaaacgcccatgcctagtcgactcgacccacacgcacaactgcgcttttctcacaaactcctcgatcaatcaacagctctccggctgtcctctttaattccctccccgcaccgcgcatccccactcgagtcccgctggcttgacgaaatcttctcccgattccccgacactcccagaaccatgcagggagatggaaactccagtccggatgggacgtctaatgatacccaggccctgcacaagaagtactggcctgttttcctcaagtatttcaatggctacgatgccatggagaagatcagcgtgcgcgagaatctcaagcgcaagctcgtctggcaggtccttatgcgcctgggcttagtgacgggtccattgggcgctatggatctcgatccgcgtgaacaggtgttagttagttttcggcactggtaggtggtgctggtatgatgttgatgtagagtatgaatatggaacatgataactatccctcttttacatggacgtaggtttccaggtgtcggtttatatcttccggtgaatcccactacgtagtatagatcagacacctgaggtatgttattttcagtgtaatacagcccgcgtattctgattacatacccactctgccattccgatggtttccgcgtgccctcagccctaatcattgccgaaagcacaatgtttgatcatggatttagtaggtgaaagggaattgaaatggttcgtatttgagttatttagtttaattgggttgatggttctagtatttatatgaagatataaaagaatgacagtgttagggcaaaaatagtagcagttcattcacatgtaaggttggaagcatacaattatatcacattcttttcgcacaatgatcagcacggcagtaggtaattttttttcccgcaaggtatgtaatataatatgcaatatttctccaaatgtattgatatgtattacgtttaccctgaggatttcatcaccggcccgcatatccgaataagcaacggtccaacgggctgaagattataggatagcaaaattattgggttgtagtcgggcatatgtagactaaagttggtgataatatctgtcagtagtatggtattggtgctaggatattttgtcactataagaaagtagtcattcaaagaaaagctcgactcttcccatgttagatatttccattgtgcgccaatggccggaggagctccggtggtccccgcgaggtttagatgtattttttatgtatgtatgttttgccttagattgatgagccgaaagttgatataggtattctgtggtattctgtgggatatctaatgttagtacctgaagagaaactttatatatagagtagaaggtctttgatggaaggtttctagccagaatgccatagtgctatccaattggctggacatttgttgcttaagacctcagaaccctgaagcatcgccacttagacagctattttaatcatgggtctcctgggctggggctgttattgggtaatgccatgtgaagaagcatgcggctcaattttatgactttgaactggttctttgttggtttcatagactgtataaaaagtacattgccgatattgctgacctcggcaaggcaaatacacaactagaaggggacatagcatatataagacagggtattctaggggttcattctgcactgcgtaagaagtatataggtactataggaatatacctctagtacagaatcgtctccgagatgcccgactcctctgtatataggactatatacagggcagtgagatgaatgagaaggaatatagagattcaaagaaatgagccttgaacaattaagaaggtaaatccaatgcaaaggaagtaaaacccttttatgcgaaattccacattcaaaaaaacaaaatgtgcccttcaaatattaattacgtgtaaagaaaaaaccccgctaccagttctgccctgaaccaaataattttgtgtcttctctctcttctctcctacaacttctccccctccgcatcgggctgttttctcccttcctcttccgcgacttcctttcagattccccttcggtacctctccgtctcagagagaaccgagatacttcatctgttccgaaccttcccacgtgcgaatcgccagtcatttttcaagggatcgacactcagcaattgatcttgtgcttcacatccaggttatcgaatcctgacaggaattacacagcgttcctgtgaatccgacttgcaccactcagcgactgagcttttacgacccttttcagcctggagacgttgacaaggcagtgccttaatcgcgtcctcggtgggaaaattttccttaactacactttcctctttattttctgacaacttgtgtgctcacaagtcacggttgttgaaatcagcactccacaacgagaaatcgtcgacccacttatcaatgcgatttgtggtctagacgatcctcaccgatccaactccttcgattaccctttcgcgacccgatacttccgtggtccttcgtcgagctcgtttacacacgaatcgtcctttcgacacacaattgagagtctctctgaaaagacgggaagctgcagattagtggggtcacaagaagctggaatctttccctttcttggtttccactttgcgcaagtgccatctcgcccccagtaggcgtagactgagatccagagttacccaaggtcgtccggtaaaataaaccgcacctcaaatttttttccccacacactcgatcagagctaccataagctctcaatacgacatgtctacgttttcgtacgcacaagccgccaagggcgtctccgggacaccggccctgtctaagacaccatcagaatccgagaagactgactccaaaccggaggaacacaccaccgtcgagactacaactgatgaagcaccggcccccacagagtccgagcccgttcaacaacccgaggtagtcgcagaggagaacaaggatgatgatttcaccactgtcacgaacaagcatgccgccaagacaaaggctatcaactctcgaacatcaagcccgagcgttcgcacaggctcaaaggcgcgcaagtcaaaggaggatgattcccatacccctaatggcaacgcagatgccaccgctgagaagcaggctcccagtgagggacagaccgagaaggccgaaggtgccgcagagaagtccgctgaaaaatccgaggattccgagaagatcgcatcaccacccaaggagctgaaggctgctcctctcccatcagtcaacatttggcaacagagacgagaggcccaggatgccaaggtcaaggctgtccccaaatccacctccactagcaaggccgcctccacgaaggccgcctcgactgctgatgagacccagcaagactccaagaccggctctaagaagaagggtgccgatggtgcacaggaaggcgccaaggatcgcaagaagaccgatggtggaaaaggacgcgatgccggatcagttcccccagtagaagacgctactgcatggcccactccccaagttgcgattggcgaagagaagaagaagtctcacgaaaagaccgaaaagagccctgtcattagacctcatggaaaagaaaagtggacaccagttccttacgttcctactgctgttttcaacaccccgctcccatctgctggtggtcgtggaggtagacgggctacccgtggtggccgggacagcggccgtggagctcatggaaatggaaccgctaccaccgataaggctgcctctggacaggccgcccaaggcgcaaagcagtcacctggagaccgaggacgcctcgagtctggatctggacgtgccgcttctcttcccgcgcaatcgcgacggtccacaagcactgatgccggtgccacagccgatgcacgcaaggcttcccaggcacccgagcgcggccgtggtgctcgcaacggagaggagaacaacaagcaggtgaatggtggcgagaacggcccccgccctcaacgcgagggcaagcccattggaagaagccaggatgcccgtgcaggagaccgcaaccagaagggtgccaacctggctgttgacttgcaggctgcagcccgtggcaatgaccgtcgcttcgaggctggatccaagtctgccgaccccaccggtctcactgactttagccgtgaacgtggagagttccgatctgagcgtggaggtcgtggatctaaccgcggccgtggtggtgcctacgccaacttcggcggccagaatgcccagttcaatgcgtctatgtctaacaacccattccctgcgcctaagtcgttcggcttcaacgagcgtcagcggtcacaccagcacggcctccccaatggagctcaacaaggaaaccgtatgcccctccgatcgccctctgtgcccactcccgcaaacatgtacggtgttgtttatcctttcccaggtgatatcaacacgatgtatggctacccagctgccccgatgagcgctgttccctaccagcaatatgtggagcctttctcgctcatgaatatgctctccatgcaattggagtactacttctcggttgacaacatgtgcaaggacatgttccttcggaagcagatggattcccagggctttgttcctctgaacgtccttgccagctttaagcgtgtcaagtccctcactgaggactttgagctcattcgtcacgtgtcccgtcagctccgtaacgttgagtgccagactggcgaggatggtgtcgatcgcctgcgccccagagacaagtggcagcagtgggtcctccccgtggatcagcgtgagcctgctgcccagaatgagggcgccgcccctgctagaaagaccgacgagaacaccccggttcacggccactccgagaacgttatcaacggatccgctcgtcagttcgttcccaacggtgtcgcccatgatgtcaagacttcactttcgtctaccgctccagaattcatgccctcattgctacctactgcagtgaacgaaattgccaatgtaggatacccctggaacttcccagtctcccctgatgattcgagaatgtcgttcttttcgtcttcttcgtctttccctaatttaattattgactcttctttctcagcgcgtggactagattcgcagtccgaaccccctttcccctttgatttggaatcgatggtgtccccgacaaggtatgctgaattttttgcatgtgaaatatattatgtgcggtactgactcactgtacgaacagctctgatgcagattgctttcaataccaagtcggcggtactgattggttgatcagcaagtcttttgccgaagcgcatcaaccggcgcctaagtcaaatgggaagggccgttcgtccacacaaacgtcaaattatgtcccaaaaactttcaatatgtctcgcaaagaaaccttcgatggccgaggccgacagatgtcaagaaggtatagcattggaatgacccagccttacgaatcctggtcattcagcttgacaaaaaatttcaattcgcatttgtacaatgaatttaggcgttcagcccttgatgatcttttgactcgacacgttgacaacggtttcaacgagctcatggagttttatcggaactgtttgcttcaccgtcgccacattcctgacctcgttctgtacgacatggtctatctttcacaaggtcaaacatcggactaccacactctcgtctccaatacgatccatgaaaccattgccagtggaaagatgaaattacacaattgggggagaatcagcaaatatttcgatacccaactgggcaagacggcgggagaaaagttatcatgagcccttttgcatttctttctgaattttgcttcttcgcgacacgtctccttctactgcttgttcatctttcatgaccagcattattcttttttttgttcaatacggtttttttatctcttgcatgcatattcgccaacttttctagagttccaagtgaccctttcattgcaataacgcggtctggtttctcggtcaactcgaaccttcggagttttctcacctcctttttttctgtttgatgatttcattgctttttcagtcatgggagattctcaaaacgttctggcgtccgggcatgattttactggcagtctctctttcttttgatgcctgccactgcggtgtgccgggctccaaaattcgttctctttttcacccttgacatagatatttccactacttttcttgtttcctttcccgaggttgtggcttttcctttatcgatccagtcaatttgcgatccaggcctttcatcggctctgggtcttaacaagtatcagcatggcaatactcagaaaaaagcacatgttttaaaaaatatcgcctcgaggttttctgtgtttcgagtttcgtgatgtcaatcggaggaatgaatccagcatatctacattgccgatctcttcttccctgttgaccatccattcggtctaccaggttcttctttggacagatcctttgaagtggattcatccatctcagtgcttttttcttattgctggggttcctgcacagaatattttgttttctgtactttgttttcttgcataaactgggctggctgttcgggtctttgtggagtaatatgattgatatgattgataatgcatactatgcaccaaggcattaaatttgctctgtaaaataatgtgaattgaaagacgtgtttgaaactacataataatgattgtcatctataaaaccgcgagtcgagtctgatggaatgaggtcgatcgttcctgcctcaggcagccagatcttgcaacggagataattcaatcccgatccggctctaacagctccctttcccctctctagctctgttcagcacctccagcacaccgttcttcttcgccttttagcctctttacctttaaatccacctttttatcaggatggagggtgcatcccgccaaacgtcaaggctactccggcctcgtggccagaaactccttccccgtctcacacgaacctccgcagtcaacgccacacccttcacccatattcaacgacggacactgtcgaattcccctcggccctttgcaccagagtctcttctcaacacctttagaaccggtggttcatacaacgaaggacccaccagctatttctccaaccgacaaacacttcccgcgaataccgttgtacgatttgtgccacagcagacagcatggatcgtcgagcgcatgggaaagttcgaccgtatcttggaacccggtcttgcgatccttgtgccgttcttggaccgaattgcttacgtgaagagcttgaaggaggcggctattgagatccccagccagaacgcgattacggcggataacgttactcttgagctggacggtgtactatatacgcgcgttttcgatgcatacaaggcaaggtgagtggttcaagggcggttcttggttgttgtgtgggattggaccaatcgggacaaagcaatcgttaatacatcaatcgtcaattctagctacggagtcgaagatgcagaatacgctatttcgcaactcgcgcagacaactatgcgttccgaaatcggtcagttgaccctcgatcatgttcttaaggaacgcgccaatctcaatacaaacatcaccaaggctatcaacgaggcggcccaggaatggggtgttgtctgtctccgatacgagattagggatatccacgcgccggaggcggtcgttgctgccatgcaccgccaggttactgctgagcgctccaagcgagctgagatcctcgaatctgaaggtcagcgccagagcgcgatcaacattgctgagggtcgcaagcagtctgtgattttggcatctgaggctctgcgctccgagaaggtcaaccatgcttctggtgaagccgaggctatcaagctcaaggccgaggctaccgcgcttggtattgacgctgttgctcgggccatcgaggagggtggcgagaatgctcatagcgctgttggtctcagcgttgctgagaagtacgtcgcagcttggtcaaacctggcacgtgagggcacagccgttgttgttcccggtaatgtcggtgacatgggtggtatgattgccaacgccatggctgtctacggcaaggtcagcgagactcacgcccgggggctggcaaagaaaaccctcggggtcgaagacgcctctcggtcatcggagacatcgcaaaacagtcaggtgccgaccttttttgaggaacaggctgggcagaacacacagtcgaatgtcgcctcgcgaactgccgaggagggatttgaaactgtcgccggcgaacacaagaaataagcatctatacttcaccgaaccgaaacgagaacgacgactcctctcttgatgtgattatatttctttctgcctcttttgttgctctggcacctccgcccagtcagccctagtcttcagctcctttggtatatgggctggctgtttcccagtctcttcgacattcttcttgaattgggctctctgaatttacccactacttcccatctccattacttacctttcccgctcttactgcctattgtcttcctattgttgtccggcatttctttaggagtcttccaaaacgcacgagcttcgctgtgtatgtggcatcgaattcgccaaattggttcctgtatgtgtaaatagagaatttttgttgatcagagagcctgcgcggaaggaaatatctcaatgtacaagtatcagtatctttacattgctttccaggaattgtaggtcggttgtgagacatcggataaaccgggtcagattaaatctttggtttcatcacttgtacgattattgtgaatccagtagttggctttcgatcttgattatgctgccggctattcctcaaaagggtctactcaatgtactacagtttggagatagaggccactaatacaagtgcattgctaacagctcttagtaaaaagttcccctggtcctagttagttcaaaccgaatacaggagggaggacaacgtacttgaaaacgaatagaatcacgcagcagaaaccaaagaagcaggaataggttcaatatcgaacctgatctcaagtgaggaactttgatcccaggtcataaccttagaaatataatatgtacccctcggaaagatctccaggaccagatacaccgcgcacttaccaacgcgtgtacccagaagagcctggtactcgggggtgttatactgccatatcagcggcgcgtcacaagccggaggccaggtcagaccattacgcgatgaatataaaacatcctggacaaaatttttggtattgaaattgacaacatcacagacatataagtgtcgcaaagtctgtggctcagcaatctcctgcaaccgggctcgggcaatctgggaaaactgaggtccgtcacttctgaacatcgcctcgacgatgatcagaccccttccaactaggatgtcatacacattctcacagccagctagcccaggatcgccctctgccaacctgcgcgtcagtgtctggttatatatcgctttgttagtgtaccccagtgcgaaggcattctccgcaacctggaatgggatgttatgcttctcggtttgaatgagccagcgtgcctttgtaagatccgctacggtcagggcgttgggctggatttggcatgtgggatcagtggggtcttcgatccatcgttgtcgtgtagctcctccgtcttggatcttgccgtaccgccgggctggggtggaaatggctgggggtacgtctggggtggtgctcggaatccctaggggaggattggggggaacccaagactgctctgaaggtgtcatattgatgtatcagtatcttgtatcgatcactcgaatggtgagcttcattaccatatatagtatatgccggtataggtgtggtacagatatccataagaaagaaaagaagatcatacaacaaaaacaacaatgacctggaagacgacaaggacaaaggcaaggtggaagtttagacgactgaatcaaaggagactgcttctttgagaggcttgacaaagaatgaagagctctgtttcaaaagctttgtgttcctttgtgcaaatacatacttgtttgaacaagacaaacataagtcgaatgacaatataaagcctgggctttattactccatcgagtctttctctccatatttcaccagacgctttgctggtaattcaccaactattgtccaaagcagtattcacatctctggatcatcgaagccaaccctggtcttatcttcagccgcgacaatgtctcttactagacctaaccacctgagctacgaacagcatttcgagcgagaatgcgagttcttccaggaaactctactcagggaggctgactcgctcaatcggttggaaaaccgccgcgcaggaaccattcaaataatttgtgatctgatcgtccagctggaaatcgtcagacggctcgctgagactatggccagaaagtccccgatgtgtccaactgtcctgattagccccccgggatatttccgcggtgaatttcaaagcttttgccgtgcaaagattctacctggtctgattaggtcgctgacttgccttaacgagtcagacattatctatcgcgatatcaactactcagtcgctgctcaattggaggagatccacgaggactttacttttgtcttggatagccgcgagtagccagattgtcttgttaggattctgtctgctttttctaagttgctggattactctagcaagttagatgcccatttatatatccctgtacagatgttgctcaatgacattatctcaggtgaatatgacctttagtttagatacgtcgtatacgtcgcgaatacttcactgcattggttagaaagataacatggtccattcagttcgtattcaaagttaatagttatctgtattatttccagacatgtcatttcgtggcctatatcgtatatggcctgttagttctgcttgcatgtctcttgtagtcttgaacccatttgctctgtactttgtagtagacactttatttaccaactgataaatatcacatactcattttggacctcacactccatgcaccagtagtctaccatcacacttcaattacatattctaagtatacgtagattctaaataaaacaccgtaaggcatcagatgccggcaatggcaccatccaacgattggtttactgacatacttatttgtgccgttccccccacctcagctaatgtcactggtatattaacctccatccccctcattcttctcttactcttctcacatcctctacatcttatctctaaagcaataacatagcctataaatcatccaccatgtctagctctggaaaaggatacactgttaccggctccggcactaacagccaggtaggtataccccgctccatttcctatgttatatgccaacaacaagataagacatgcattcgttcttggtaattccagaccatcatcaatatgtcacttacaagaggtaaattagggcaaccattattgcactcgcgactacggttccagcgcttctaactcgaacagctaccactactccaatacgtaagctgtctcaatgcatatgataatgcagtgaacgagaacagtttattctgactagttgctttagcaatggatcctactactactccaaccccaatggaagtacctactacaacagcgggaagggaagctctacctacacccctccttccggaggatccggcaagaaataagttctcatgcaataacgtcgacaattgattggcgtatcatgaaggcctaatttatccaaagaaccaatgaatctttctgtttcctttataaagatgtgtagttgtagtgtaagcatatctagtagagaatcctcgatcacttaatgctcgaataaattgaagttcctagtcaactgaggtccagcttttccaaggttctctatattgtttgagttggttaccatagagatatctggatgttttacctcttcttcaccaagggatgaagcccaaagacaccgagaccttaacatgcaagcttgtaattgaactagaaaaataacatatgctggtacttgaggactattgaatctctccagttttttcccgtaatcattcattgacgagagaaggttgtccaggtatacactaagtggccatacttccggtagaaccatgtttgccctgctcactttgtttgataaaatcagcaagcataaaaagatcactgcataatataaaatatttcaatggtagtattccccctcaaaaaaaatcaataagtgctagttagtccttgcagtgtaattcaagagactatcaacgcgggagctcggaccaggcaaatctggagatcgcgacttttggattcacgtccttttaatatccggtctctttgaacctgagccctttgacttctatttcttgaatctgtgaccgaggaatccattcgttttgactcttggtcctgccatgttccacgttaagttcatataatcaccaaaagcctagctccgactcgatacgccgcgccgctcccctccctacccacgctctgcgcacattggcgctgatacgtgtcgcatgacctgatctcgaggcacgatcacgcaaaccttcgagaaataaacgaataaccgtgactttgttctgcggctggcgcgatgcatatcataaagccagtttggctcacccatggaggtacggagcttgatcgccctggttttctttgctcgacaccgttgggatagaaatgcagtgcttctgagagcagaaaaccaaggtatccaacgaaagaacgagtttgctaatgtttttgctctgacacaggtgaacgtaaggatttcgaggtttacagctgcgatgtctcgccagatgggaagcgactggtcacagctgctggaggtgagctcgaccctttttgctttgaggtggaggccacaaagatcatgcgccatagagagaattatcgctgacattcttttgattcgctctagatggatacgtgcgaatctggtcaacagaagctatttacggcaccggtacacccgaacttgagggcaagccaaaacaactggcgtccatgagcaaccactccggcacgattcataccgtgcgtttttcacacaacgggaaatacctagcgtcaggcgcagatgacaagattgtctgcgtgtacaccctcgacgctaaccctccaacacactcatcaacatttggtatgcttcggacacactggatacggagagacaaaagtagatactgacagctatggaaaactattaggcaccgatgaaccacctcccgttgagaactggcgcacgattcggcgattgatcggccacgacaatgatgtccaggatctcgggtggtctttcgactcatcgatactggtctccgttgggctggactcaaaagtcgtggtgtggtctggccactcattcgaaaagctgaagacgatagcgatccatcagagtcacgtcaaaggcatcactttcgatccggccaacaaatatttcgcaaccgctagcgatgaccggaccgttcgcattttccgattcacctccccttcccccaattcttcagctcacgatcatatgaacaacttcgtccttgagcagacaatcacagccccattcgccaattctccgttgacagcttatttccgtcgttgctcttggtcgcctgatgggatgcatattgcagctgctaatgctgtgaatggtcctgtgagctctgtggctattatcaaccgtggatcatgggatggtgatatcaatctgattggacacgaggcgcctgttgaggtttgtgcgttctctccacgactttatgcaactgagccgcccaacaagaagcaagccgatgggcagcctgtacctcaacaccacattaccgtcattgcttgtgccggtggagacaaatctctcagtatctggattacgagtaatgcacgaccgattgtggttgcgcaggaaatggctgctaaagccatttcggacctggcatggtctcctgatggaaagtgtctctttgctactgctctggatggcacaattgtggcagtccggtttgaagatggcgagttgggctgggccacggcaatggaagagaatgagaaatcactcaccaagtttgggactaatcgaaagggcgctggaatcacagaaactactgacagcttgttgctggaggaaaagagcaaagctggcgagatcaagcacgtcgaagggagaatgggtgcactgatgggcgatggcgccgaacctacgattaatggagataaagccccacaagcatcaaatgggaccgcacctgctcggggctcttcgccagctcccgaggctacgaagacccagacgaatgggaccctttcgacacctgccgccacagaatcagagaagcctgacccttacaaagccaagttggaaagacttaagcagcgtccaacctacaccaaagagggcaaaaagcggatcgctccattactagtttccggagctggggctggcgagtcatctcttccacaagcccgtttgatggcgtctgtcagcaatcaggtcaaggctgatgccccgaccaccatcgttgacctgtcaaaacccttcgatggcttacccaagggtggcctgactgctcttcttattggaaacaagcgcaagctggcccagatagaaggcgacgaagatggcagcgtcgaaaagcgtgtgacacttgccagtcaaaacggtgcaactcccatcatggccaacactcccgacggccttctaccagctcaagttcaatctgccacgactggtcaacagccaactccagaattcattcgccccgcagtcacaaatccttgcatgtcggtcagccaacttcgtctggcagtccctaaaattcgcagccagattctccgcgcgttagattcgagtgggaaaccgacggaacaacctggccctagtacagactcgggctcttctaagagtcgggtggacgtggttttcgaagcccggaacccatcaccagcaagtctgaccggtcgtgccgtggaccgcgagccagtacgcctgacactgttccgcggagatcaaccattgtggcaggacttcttaccgcggtctgtcctacttgtgactggtaatcagagcatgtgggcagctggctgcgaggatggatcaatctatctttggacaccggcaggtcgtcgtctggtaagtgcgctcgttctcgaggcacagcctgtcatcttggagtgcaatggaccgtggatcctgtgcatttcctccgtgggcatgtgctatgtttggaatgtgaagcacttgtcgtctcctcacccaccagtctccctccaaccagtcctggatgctgcaattcatactatgggcgtgactcccaccgccgctcccgcagtaacagacgcacgcattaattcggagggtcgaatcattgtttctttgtctaacggcgaaggatactcctattccccatcaatgttcacatggcagcgcatctcagaagcctggtgggccgtcggcagtcagtactggaacaccacagacgcacccgtgagcaacttgcaggccaaggatgcacagcaagataacaaggatgcgaaggcagctgttgccgccggcattattccttggttggagcgaaacaccacgaatgagaccctccttcgcggaagagcatacttcctccagcgtctcatcaaggttttattgtcacgcgaaggttatgagactttcgagtccagcgtatcaattgctcatctcgagaaccgtcttgctgctgctctgtccctgggtgccaaggaagagttccggttatacctatccatgtacgctaagcgcatcggtgccgagggtctaaaactgaaggttgaggagctcctaaagggtctcatcggtggtctttttgaggatgaagacgaggacagtgaaggcgtcttgaaactgcaggacaaccagcgcgatggccgtaactggcgcgaaggatctgatgatctgtgtggctggccacgggagactttgttgaaggaggtgattctagcgcttggtatgtttctttcttttttctttgttctttcttctctttcttgacgattcaattactaacgaacgttcatctaggtaaacatcgtgaccttcaacgcgtgacagttccttacgccaagctgctggacatggttgacaatacctctgaacatggcgatgcaatggatctttaatgatgttttctctcttgctatctataccttttcttcttcttgctggcgttcaataagttcgggctgggtcaacccaaagggtttgcattattatctctgctgaggcgggattggagatgataaatctcattttcatggtgtatttgtatcataggttcacttttgggtcgttattatttaagccaacctgttcctatcttgccctagtttggtcttgctctaggatcaaccagacagaccctaatatccctcgatacacacagtattacgtacatgacacccacatggatgtagtgacgtcgtcagggcttgactctcacgtgggcggtagcagctctgcaggcagaaaatttgaagatatctggcgcgtacctcgtcaacattgcattttgatagctaaagacgcattcatttactctctttgtactcatagaccttgtccgcaattgctgtggacaaccgccatcacgtcttccaaaccatctatcttcttccttcgtatcgtcgatcgatccgcagctggtcctgcatttggcgcgttccattcttgttcccgcttccgcctttcaacttccccccacctcccacttctcttctgtcgcttctactcaagcaagaagaaaaaatccaataagatgcctcccaagaagcagcaagtccaggaaaaggtccttttgggccgtccaggaaacaacttgaagagcggtatcgtatgtgagctaggcccccacccattcttttttttttttcctttttccacacagcacagtccacttttacttccgaaaaactatttaaacccccttgtcccccttccctcccgccttttttttttcttttcctcaaccatgattgactaacaatatggcttcaggttggtcttgccaatgtcggcaagtcgacactcttccaatccatcaccaagtcctccctcggtaacccggccaattttccctatgccaccattgaccccgaggaggctcgtgtcatcgttcccgatgagcggttcgactggctctgccagcactacaagcccaagtcgcaggttcctgccaatttgactgtgtacgatattgccggtctcactcgcggtgcctcgactggagccggtctgggtaactctttcctgtcacacatccgcgctgtcgatgccatcttccaggtagttcgctgcttcgatgatgccgagattattcacgtcgagggtgacgtcgatccttgccgtgatctgaccatcatcaacgaggagctccgcatcaaggatatcgagtttgttgagaaggctcttgatcttcttggcaaacagactcgtcgtggtggacagtctctggagatgaagaagctcaaggaggaggaggctaccactgccaagatccttcaattcctgaaggatggcaatgatatccgcaagggtgactggacccccaaagaggtatgttggaatttttttcttcttcttttcccaaatcaacttgccctttcaactcctttcctgatgaataagagcactgctcgaaattaacccagctcgttgagtgccctcattaaaaggatactcacaatccgagggcaccttgagaaaaaaagttatatgctgaaattttggagtccacttctacatgattgaatcactcatactctttgtgaatcctcatgctaaccgaattggttataggtcgaagttatcaaccctctgttcctcctcactgctaagcctgttgtgtacctggtcaacctgagcgagagagattacatccgccagaagaacaagtacctccccaaggtcttcgagtggatcaaaaccaactctaccggcgacccaatccttcctgtctcggctcagttcgaggagcgtctgaccctgatgcacgatgatgcggccgctgaggctgagtgcaagactctgggcaccaagtccggtctgcccaagatcatcaccaccatgcgccagtccatgaacttaggcagcttcttcaccactggtgaggacgaggttcggcaatggaccatccgcaagggcatcaaggctcccgctgcggctggtgtcattcacacggacttcgagaagaccttcatccaggctattgtgtacaactacgcttctctccgtgagtacggtgatgagaatgcgatcaaggctgctggtaagattatgactaagggtaaggattacgtcgtcgaagacggcgatatcctgctcatcaaggctggtgctgctaagcactaggtgcacatagacaatagttcttcaaatgaaacaccagtgttgagtcttggcattttttccaactgtaaatttccttgctgttgcaaatcatcattggtaggtcaatgttgcagaatatacctcatttcccttctgtatgattcttgccttggtatttgaaggctaagcctacaatagctcacattcatagtgaaagatcatacattctattgtaagctgttcagcatgaagtcgaagcaaaaaatccgaagcacttaatttggtcacgtgaccgcctccccgcgcatcccacttcggtatcaagagcttgattcttatattatcaccacctcaacaagcatcatgtttaagaaagagtgagtcaaacgcttctcataaacccacgactagcccagtggattgtttggtgcctcttgtctacccaatgggagcacatatctctctctgtttgaagaccgggaaagactgcaggagctgtccaatgctccattcaagaccacacagcgcccatgggataaatcttgttcaaaaagattatcaaaaacaccagctaacatccgtgctccatctagtattcccccaagcaaccgatctaaggtgaagtcctcggtgcagcgcggcctgcgccagaagctgctggaaacatacccaggcctcgagcccttcattgaagatgtcatgcccaagaaggcctcattggaagccgtgaaactgtaaagttcccattcccgcgtcttttgtcttccgattccagcaacgtcatctctggctttcgacatgaacgtgctgcatcttttctagagacccaaaagctaaccacaaccaccgccatagacccgatcgcgtgaccctctacacgatagactcaacccccctcttcttccaacctatcgatggacccccagtcccacacctccgcctcatccacgcctacccctccgccatcccgacaatccagatcgaccgcggtgccatccgcttcgtgctttccggcgcaacgctcatggctccaggtctcacatcccccggaggccgtctacctgatgccgagcatgcgcttgaggccggacagatcgttggtgtcaaggctgaagggaaggaggagatttgtatggttggtatgctgaaggttggcactgaggagatcaagagtaaagggaagggagttgttattgatgagggccattatcttggcgatggactttggagaatgcatttagattaagggacatggttttcaaaagaagcaagggattcattgggctggggttgtggtcttttgggatgtttggcttggaactatacctttatacctctatacctctctgcacgcatggcgatgattatgtgttggatgatttgaaatgaaatatccccctggacaaggatccagattggttcaatggatgtattgattgaatgtagatagcttcttgtattgtcttaaaaggctttgtaatttatgtaggagaagcacaggtacatgattactggggtattcggaggttcttaggttgaaatatatattttgacgatggggctggttcgcagaaacttcccatttcccccttttcatcaatgtcttttgatccagtcgacacttatttcacaatgcattccaacagtggaaaatgccgattggagttcgctcatggtatgtggcatagctaatgccacaaagccgcaattcaagcagcccaacgacaatatgagattgaatcactggcaacacgactgacccatggctgatattgagcagaatgggcgacaaacgacgtctggaatcacgggtgcaattatctagaccagaaactgtctagtgaaggggatatgtcgaatgtcaacgaggatgtgatgtccgaatccgcgagcgagaccttggtgaaatccgagggcgacacatctggaaacggttccttcactggccagacctcccaggacgagctgactgaggacaaattgccccgaaagaagaaaagctcagtcaacaaagtctcgacacagcttgtgctagccatatatgtaagggagacgactgcaagcaacgcatctgaggatgaaattgaaacggcaaaacataccggccttaaatccaaatcacgtcgccggaagattgaaaaaccagagaaggagcaaaaagaacacaagaagcagatgaagcagaagaaagccgaaagcaagcagtacgaggaggagaagagtaccccagcgaggaagatgggaactagagaagaggaacctgaagaacgacagttcgaagagcacgaatccaaggagaaagccgaagagatgaagcttgcaaagaagcagaagaagcacagaaaactcgaggcgaagctgagggaagaatcatgccgaaaagattctgcggccctatcaagtcggaagcggaaggccgacaatgaagatgaagttaccacgacttcaactacggcaacagaagaaacagcataggacttggaggagtgatcagataggggccgagatatgctcaaggatgaagcatgtaattcattcacacagttcacacagtctaaatagggaaactggtcatgctccgtggagaataatgagcctcgatgctacgagtgcctctggtcgagctcaacggttacagttacacaaccggcgtctatgttgctttctttcctagacgataattgactcaaacttccaggataatctcccccgaatgtctctggctgtgaaaacaaatctcctcgggtctagtgatgccctcgagcagtgatgatgtattggacgaagagagtcgtataaaaggaccagagaaacaaaacccacatggatcacaaaagctgtcctcggtgatattccgaaggccatagctgattggtacatggatgttgggtgttctcgaggctcaaaatccgttagagggaatgtaatttgaatctcaaatgccccgaacacgtatagtgtgggagtgaagaagtagaaattttatctccagggctggaatatcaaataacgacaacaagcagagagctgggaaggctcgtggattatgattattataaatgaagtgaatatagccaaaaaaaaaaaaaaaaaatcaagctcatgcatgcatcaaccgattacatacctagtctacatcaatagatgaaacctcgaaaggccgaccaaccacctgcaaaaaagaaaaaaaaagaagaatcccatccattcattaccattcctccatgaataacccaattctcgaaacatagttctcaattctccagaccttgaagctgaagtcataccgagcgtcggcacataccaaagcccggcacataccaaagcccggcacataccaaagcccggcacataccaaagcccggcacatcagccgatcttcaagtggcaatttacaggagagcgaggacaccagccagaagaccagcggcggtagcgggggcaaccagacccatagcggcaccgctggaggcagagggagaggcagagctggtagaagtgccggtggtggtggaagtgctggtggtcagaccggtggtggtgccggtggtggtttcggtagtagagctgccggtagaggtgccggtggtggtgccagtagtagttccggtagaaattccggtagaagttccggtagctgtacgtacagaggtatcagtgctgtgcttgccaggggtggggggactagtagtaagggagccagaggtaagggttccggtgggggagggtttgatgatagacacgtccagggtggaagtaccagtagtggaagcctcggtttcagtggtggaggcaccagtggaagtggaagtagaggcagtagatgtagaagcagtggaagtggtaccagtggagacaacagaggtagaggcagtagaagaggaggagacagtggaagatgtaccggtagtagtagagctggaggagctctcggcggtcacattgaactgctcggactgagcgaggatgccggtgttcttggcctcagtggagagcaggttgatctggaaaccggaactgcagtgtacattaagtgttagtagacatacaatcgacgcgccacaaaggcgatcttacccattgctgacgtccttcagaccactggcagtgtaagagcccttggaggtgtcgatgccagaggcaatcttctcatcgacgggggggtagacggcattgttgacaaggacgatgtcaacagtggaggcgtcggtgctgtaattggttagttttggctgtcatggctagtgtaagatgtgagtgatcatagtcgacatacttgacggatgtccatttcacggtgaaagatttggacagatcgaggtcgtcgcccttggagggctcggtgacctggatagctagactgattattagagagagtctcgcgtcatatggtgatttacatacctccaacggaaagggccaaaggcaggagagacagaatggtggagaaacgcatcttgacttattaaagcgaatgtagtggattaaaaaaacgaatgaacgttggagtgtaaaagagcgagagagatgcgagagagaagttggaagatggaaaaatattcagattcaagggtccatgtcattaagtaggtgaccaaacatttcatttgatattgcacacaaccttggatgccctgaaccgtcaacaatgtctctggcacccactaccaatacggaaagatacctgaaaatagaactgacatggcgaggtacccggttttagagcatcccaaaaatattttaaacattttattatacacaacgtgggaattcagggtctcagtaaggttccatgtggaagtaagtagagcttcatggctcgccgaggagctagtttcaggcgcaaattccactttcgattttggggaatctgactccgtgttccgtactctattattcgatgggagttccatattataattgtgtatacttcgtatattgtatgtactccgtcgttattttttacacccggaggtggcccgtccactatggatcccagccatcggtgtggtccgccgatagggtcgataagaggacgctagacaggcttggcaatccgctagtggtatttggtacagtcttggcacagaaccgaacccgagcagtatgaaacggcgaattacgtatgtatggtatccgtatttttgaattgcaaattctgcggtaaattacagaaaggcaatctggaccctgaattttcatgtatcttttcactagctcgagcaagggtgttggccaccaatttgagggaagatcagcaaagcctaatcatccatggggtaaggggaatcaaaaggctgcccatgagtactcataaattcatatccaatatttactccgtacgatgtctcagaatgaactcgaaaatgctgcgaacacaccgtttcgatgtctcaacgaagacccactccacagaccaatttcaggattgagacatatctgaatttgggtctcggacgacacgctaaatgaaccataagtgggagcactggaggcgataaaatgagtgtctcagaacctgcaggcacgttattatctctttacggacagaatggtgccatttcccagtcaggtagcggtcaaatacggagtcagatccgaatcagtaaattcctttttctgagttatgatttgtcgaatacggaaggaagatacggagtacggagtgcagttcccaagtgttatcccaaatattagatgttgtacataattttcgcaccggagaatccccggggatgcgccttgcgcccaacaaaagattaggtatcgtagatatccacgttactggtagtacggagttagtaatcaagccacaatcagtgctctgtacggtgtactcggctgggaaagtatacatacaagtccctcttgagaccatcccggtccatggtagccgaatcgacccagacgctagcactcatcgcctggacaccgaagtctccataccccttcttgttgataatgacaggtttcatgctaggatgcaacaggtcggtccattgctcatatgcatgttgctgaccgacaaacatgcgctgcacacctggaccagcgttgctgataacacatgcgagtccggataggtgacgggcgtttccgtagcgaacgaatcctgtttcgcagtcagatctgctagtgtggatacgtgttccccatagtggggcgcagtaatccaggggtgaaagggccaagcgaacctatgcagttgggttggttgaaataatcctgctgttcgccgtaggcatagagtttccgggcttgagttaggacgggaagatgaccgttgcaacttggtgtcattgggctatccacattcgcccgtatcccgtacaggtcaccatagaatacgcatgggtgaccgtctttgcggaggaggaccagtgcgtatgctagtaatttaaaggagtgcgccactggggtctgggctttgattagccgtgctcgggccttataaaactgggaagaagttgactcacctccagcatttgtcctggttgctgctgagagttaggtaaagaagtaaatatgccaagatcagacacagttggtacttaccgtatcgtgattcgaaacaagggtctggggaagttagctttgtatcattactcgagcgtcgaggaactcaccacagcgtggtccggccgacactgtaccaatgtatctttgaaaatcccgcgaagatctggtgccttggcatgggacaacttggagaaccgctccaggagaggtacatcatatgcagcgagatcatactctaccttctcgaggtaatgcagaagggacggtaaatgtccagtccagtactctccgatggcgaaaaagtccgggttggcggttttccgaacatattgcacgaatgcgcgttggaactcggttgagaaatgcttagcggcatcaagtcgcattccattgaggcttagggatttggtgatccacgttccccattgcaggaggtctgcgcggacttctgggtgtgtcaggtccaaatcggcgaacatcaggtaatcgtagtttccattctccgtggacacatcttgcgcccagtccttgttggatgcgacaatcttgtagattgcgttttgcttgctcttatcgtcccagtcaacgccgctgaaatgttgccagtgatacttcattgagctgtacatgtcaccgcgaccggcgaaatcaaagcctgtccagccatggacttctgtcggcttagatatatccagatctcttcctgttgttttattttaatcagcgaaaatccatgattgaatatcaacgaagagaaggataaaatcgctcacgtttaggatctaccttgacagcctgaaaaggctctggatagtccgcgccagctttatgattgagcacagcatcccagattacaccaatgcccaagttctgcgcttggcacatcaggtcttcaagttcacgcttggtgccccatttcgtgggaactgcgcccttctgatcgaactcccctaggtcgtacagatcatagatgtcatagccattaccattcacatccattcccttgcatccgggagggatccaaatctgatcaacgccgatggctttgtactctggtaaggcattctgcagacgacgccagtgctgccggtcggcgggaacatgccattcaaaggcttgcagtataagcgaattatctggagcattccatgatgggagctgttgtagattcgctgctgcttctgtaccgtgtatgcaggttagagcttcgaactgttttccggtcggggatactgaccttcaatctgtttccatttctggcctttctgtcgagatccacaccacaggaaagacggcattgcgggataccaaatggcaagtcaagcagtcaagctatgtcaatgtccagctaaatagtagttaactagaatatgcatatcctcccttttagggcttggatgtggggcgactatatttgacttcgaactgttgtaaggtacaggttttgcagttggaggtgtctccatttattattctcaaattattaaaaatgtctcagacgaaaatttcacccaaaggaaaattggaacttttctagaagaaaactccacctgagataatctcattggctaccgccggccataaatgcgtgacatgtaagataatagtaaataggaaaaaaagcccataatcatataaaggccaaagggcgtgtcaggagggaaaagaccaaaaatatcgccaaataaaacaagaggtcaaaaatatggcacaagaaaggatatctccgcgaaccaagctgagtcgtggctcaatggggggaaaaagggtaaaaatagaaaatgaagaccggaagatcggaagaagaatgaagcgaatgaagagagaaggaaaaaagaagggctgtcgaggaatttcaaacgagcatgacgaacatgctggtcatcacggctagcagtaaggcggctacaccggtaccactggtaaattgcattccagccgacgtcgaactactgccagtctccaacatcgcgagggtaacgttcgtctcggagtagccacaaagaccactaccctccatatattgcgtggggaagaaaacccgtggctctcccttgttcatatcgacacgcagcaggccctggttgtcgacagtatagttcttacagttcagaacatccatgatcaccgtgccagcattgtaagtaactgccatgtcgaggttgtaagccccactggtcgagggttgagtggacaacaccatgactacttgtcgaccctggacaccctttgtgaaaccgagctcactggctccctggtagatcgtgtgggtcgagtcctcaaagtagtttgtgcccagtaaggctgcgtggttccgaatgcgattcagtttcgcgatcagctggtagagcaccgcattggtgtcgtatttggtgagccagatggcttctcggttgacaggcaccgagttccccttcaggtgttgctcttgaccttgatatatcatcgggattccatcaaatagcatggtaaacactaagacatttttggccatctgccaagtactatcattaacaaaagcgaccagtcaacccgaggagggcacacataccgctatgtcatcggagtagctaccaattcgaggtttgtcgtgattttcggaaaaagtggccatagcattgacatctggcatggtgattctcatgttctccactgctttcgccaattgagacgtattgccctgggtaaacgcatctatgatttcgaaatagatcggataatttggcaaactgtcgatgtagttgctctgataatcttccatgatgctgactgccccttcaagaacttcacctgtcatgaaagtgtcgacaccattggaaaaattttgtaggaaacccgtattaacgtgcttggcagcgtcaatgcggagtccgtcaatggaataggtcttgatggcgttgtttgcccatgcgatcagaagctgttggacatctgcatgctcggtgaaaaggtctggcagcggcacgtctagatcacctgtctgacacctttgcgcgtcggtcatgttctcccagtttttgattttgcagtagggatggaaatagtctgcgttattgaagggtgtaaatactgagtagtcgatatgtgtggccgggttgctgccatttgtgatgtacgccatgttgttgattaccgtatccatcatgaagtacatgccccgggagtggagagcagcactgaggtcgagcaagtcttgatgcgtcccaaaatgagagttgagggtgttgaagttcaatggccagtacccatggtaggcttcgccataggagacttggccatggatattctcgatgatgggagatatcatcacagcgtcaaatcccatcccttggatgtagtccagacgatcaatggttcctcgccatgttcctccgcaataaaagcccgcggtggtattgcatggtgctgttaatgatccatctgtgcgagcgaaacgatccgtcatggtctgatatatcgatctgggcttccagtcgactgtccttgcggctgatgccgaggaaatgaggcccgtgatcaagagccctaccagacggccaagggtcgatcgtgacatcatggcagctcgtatttgtgtgatgggtcgaccggaagaggcgaaaaagagagtactgggctttcagataaagagtgtcttgattaactcacgagagggcaaagatggccggcaagtggaataaatgagtgacatttggactttatccaggaacaggaaacgaaaggaggcaaagaaagcagaagttggtccctagacaggaaaagatcggggaaaatggctagtcaggtggcacggcttttcaaggttctgttgtccatccatacatgtcttggaaccttccccccacaaccacgcgttatattattatccggccagttgcctcgggatatctgcaccaatggacctgattgccatgcgacctacccgttgatatgccccgggattcagaaataaaggtatgattctagtggcttactttaagaaggactaactacacatcaagcgggggctgcagaaatcaattttagtttcattatggtgtaattgtgggaggggaagaagcgaaagcgacttagcacactagtaacgacactattggaacaaggagtacagagtacaggagctgtcaggtaccaggcaccttgctggaggttactgttgattggtcgttatcacgtggagacactgccctaatctcaggaacggtcatcaccctatctatcacaagagaagtgacgaacttttgacggtccaatcatccgagacaaagtgccatcaatctaagagactagcgacgttactttgaatttccacaaatcgggtccaagctatagatagtactttggtacttcgtaccgtaccgtatagattacagcgtatatacgccgtatggagtaccccgtaccttgaattgatacaccaaacgctttggccttggccctgggcagttgaatacgagatatggcgatacaaaagtttgaatgaacaccttggcaaaattttacgattctatacgaattttaacttgcaccagacacccagatactacaatgaatatatacctcgaacaacgcaagaaagaaaaaagggataaagatgtgggaaatgaacagagataggtgtaatccggtgtgatagataagtgaactcgggtggctgtacgagatttgctgcgccattctcggcttcccggacttccgtctggagtggcgttgataccagtatcacatcacggtaaatactccgtactgcagggatgtctgaccttgtggagattaagtcagatatttcttttgcttgttttcttgtacggagaatacttccaagttttgacttaaataagatgcatagtggacatgttagttcttggttcctggtttcatggaagttatccgtcttggcattattccttgtttaccattggttgctattgtaaaccttggaggaatatttagatttgtaccatggttgagcccccgggaaaccgaaaagaagaagaaaaaaacccttgagaaaggggaaggacgaaaaaaacgaaaaagacggagaaaacgaaaaacgaaaaacaagtgccgtacaccatctggtataagcccccggtcgtaaaagcaccaagtgggggtgggtcttacctcaacgaccaatcggccgggtcgggctatcatgatctcggccccctaacccacgcgggtcatgaccgagaggtatatcggcattttgataggctgataattgcgggcctagaaaatcagcagtcggcagacgtgaaagttgcccactacctagccccgtcaggctccaattaatactcttttaaccgaactaggtgtcctattcggcttttgatgccaaggacaggcgggaaagaagaataaaacaatcataatttatatccaaaggagaaaaagatttaaaattacaattacaattacatctaattaaaccgaaaaaggcaaaagaaataaaaattaccgaagctgagacgttggaacccaatatactccaatacagtctggggctctaaaattgatatggagtttgtctcatctgcttttatttttatcttgagcttcattgcgactaggcttttagcttagcatttagcactgcgcactgctgttatgtgatcatttctttttcacttccacaatcgattcttccttcgtttacatccctcatctctcgtccatcgtccatcgtccctcgttcgctcgttctccttccctcgttccttcgttcgctcgtttgctagtccgcctgtcgttatcttctttggcttactgccacctttgacgccttctgttgggaatttgtgacgtgacctttgagatacatacctacatcccactgctctatggcaattgagagctgcacatcttcatctctttcatagagtgtctcatcctctcatcccagcggggatatccgcactatctgaggcgcgcgaccatcactcaacagcttcgcgcagtcaccagtcatgaagtggctactcaccagcggattggtctcgcttcttgcgaaaaccgtcacagcttggccatacgacgaggcctacctagattataacctcaatgagaataagacggccaccaacccagcagattactggggaacatggcctggccatgaggggaaatatcacccctctccaacaaattggcgcttcccgttctactctctcttcttggatcgcttcgtgaatggtgatcctaccaatgacaacgcaaacggtaccacgtttgagcatgatattgaacaacgcatccgccatggtggcgatgtggctggcctcgtcgaaacattggattatctccaaggaatggggatcaaggtttgtctcatctgtgatcttctagtggcaagaaaatatatgctcacaatgttcagggtctctatattgccggaacctccttgctgaatcagccgtggacttcagacggatatggagttttggatacaacgattctcgacgcgcattatggaactatccagacttggagagacgccatcaccgaaatacacaagcgcgggatgtatgtcttgttcgacaatactattgcgacgtaagttgtccccgtgtgcataaacaagagaccagtgctaactgaatatatccagaatgggtgacttgattggatttgaaggccatctaaacacatctactccattctcggagaaggaatatagaacacaatggaagactgaacgccaatacagagacttcaccattggagctggcgactacaatcagacctgtgactaccctcgattctggttcgaagatggataccccgtgaacgaatcagagacctcaggcttggttggatgttacaacagcgacttcgatcagtacggcgatattgaggctttcggtgtgtggcctgattggaagcgacaactggccaagttcgcctccgtccaggatcgtctccgcgagtggaacccgactgtgcgcgaaaggttgatccggcactcctgcatgatcattcaatctttagatattgatggtttccgttatgacaagggcacacaagctaccgtggatgctcttggagacatgtccgctgcctaccgagaatgtgcgcgcgcagttggaaaagagaacttctttatcactggcgaaatcacaggtggaaacgactttggtgccatttacctcggaaggggtaggcagcgtaaccagtggcctgagagctctgccgaaacaataaagttgacaaatgagtcctctgcccagtggttcttacgcgaagcgggacatgaagccatcgatagtgcagccttccactatacgacatatcgtgccctgactcgattccttggcatggatgggcagctttcagccggttatgatgcgcccgatgactgggttttgggctgggactggatggtgcaatcaaatgatttggtcaatgctaacaccggcaagttcgaccctcgacacatgtttggtgtgacgaatcaagacgtcttccgttggccatcgattgccaatggtacacatcggcagttgctcggttctttcgtgactacattgatgctccccggaatcccacttcttctttggggcgaagagcagaacttctatatcttagatgccactgcggagaattacatctatgggcgacaggcaatgtcgcctgcaaccgcgtggagaactcatggctgctttaacctgcagtcctcgcagtactacaagtggcctgttctggcagctaaaaagggctgtgaggatgtgacagttgcctacgaccaccgcgacccttcccaccctcttcgaaatatcatgaagcagatgtatcacttgcgtgaacagtacccaattctcaatgacgggttttacattgggaatttgtcaaagaaaaccgactacgtttactaccctggttccaatggaacggccacggagaccggaatgtggtccatttaccgggatatcaataccaatgcgcaaaaatacgaatccaaatatcaaccggtctggcttgtttaccaaaacctcaatgacacaaggacatacacattcgactgcaactccgacaatgtgactaagacactgactgctccattcgattctggtaccactgtcaagaaccttttctacccgtacgacgagatcaaactggtggatggagtgcgcaaactcggcttgaatgggtccacggagttgaatggctgtgcggaaagcttgaaaatgaaggcatacgagttccgtgcatacgttcctatcgctaaacatcaataccctcggcccatgatcaccaaattcacccccggccatgatttcccactgcgttctactgtggcgcccaaccttccagagaatgtgacggttgagctttacttctcggaagaaatgaactgtacctcggtgaccggggcaattaccatcgattcatctacagagactgggaaggttccaaccctagattccgatactgtgaagtgcacaactatctctcccttgctccaaacaaattggactgctgagatcccaagcgtttggaagtggacagcaaacctcactggagtgtacaacggaatccataaattgactgtcaccaatgttaccaacaaagacacaagctcttatacctacgctgttgatcacttcctcttccgtgtcggccagttcgataaccctatggtgttcacttccgccaactactcgagcagtctactccacaagaaggacaacggcgacctctttatccagcatcatgctgctggtgcagacaaataccgttattcaactaattgggcatcgtcattctccaactggaaagaatataaaggcggaaatgataccatcgagaggctcccatggtcaggaaccaagaaacaagaatgggacggtgagcatgtgcgtgttgagtactggagtcgtttgactggaagtagcgactacgtgcagcaaggtgacgctgactgggaccacccagtcacacgacgtttcccccatgccttcttcaatggaccctacaaccagtatggattcgacgggggccttgacaacagaatcacactcgacaccaaaaccggagtctggtcctaccatttcacgtccgaatggcctgcagtcggtcagctaaatatctggggaattaacccagacggaaagcccgatcaaacctgggttttgggtgatatcgacaatgacacagtcctagaccgaagcccaccgtctgctctgagcgcgactttgatcaatatcaccgccgcgccagcgaaaggctacctctctcacaaaatctacttcgacgatggaactctccatttctggctcgatccggttggacctcagtccacacagattgccatgttcgtgttattctggatcataccattcctcactgccgtgggatgtgtgtacatcttcatgaagtctttctataaggtcaaattcaaccaggtcggtgtgagtgagaagcaaaacattccgctcgcaatttggaacaagatcaagacgtccagtggtcacagggatcaatcctcaaacccactaatgcgcttagccaacaaatccggcttcatgcaaagcaccaccgctctgggcggagctcttgcttctggcaagcgacgcatggttctaatcgccaccatggagtacgacattgaggattgggccatcaaaatcaaaatcggtggtcttggtgttatggctcaactaatgggtaagaccctaggtcaccaagatctcatctgggtcgttccttgcgttggaggtgtcgactaccctgtggaccaagaggcagagcctatggaagttaccattctcggcagcccctaccaggtccaagtccaataccacgtcttgaataacatcacctacgtcctgcttgatgctccagtgttccgtcaacagtcaaagtccgaaccctaccctgctcgtatggatgatcttgacagtgcagtgtactattcagcatggaaccagtgtatcgcggaagccatcaagcgattcccgattgatacctaccatattaacgactaccacggttctctcgcacctctttacttgctcccaagaactatccctgtttgtctctccttgcacaatgctgagttccagggtctctggcctatgcgaactctcaaggaaagagaggaggtttgctcggtctttaaccttaacgaagaggtcgctcgtcgttacgtgcaatttggtgaagtgttcaacttactccacgctggcgcaagctatcttcgtgttcaccagtcaggatttggtgccgtcggtgtttctaagaagtatggtaaacggtcctatgctcgctatcctatcttctgggggttgcataagatcggcaatctgcctaaccctgatccatctgacgtcggtgagtggacaaaagagccaaccaaagagcaagatatcaccgttgatgcaacatacgaggctggccgtggtgagctcaagaggcaggcccaggaatgggcaggactcgatcagaatcctgatgccgatctacttgtctttgttggtcgctggtctatgcaaaaaggtgttgatctcattgcggacgcaatgcccgctgttatcgaagcccggcctaacgtgcagctgatctgtattggccccgttatcgatctctacggtaaattcgctgctcttaagcttgaccacatgatgaaagtctatcccggacgagtcttctcaaagcctgaattcactgcacttccgccattcatcttctctggggctgagttcgccttgatcccatctcgtgacgagcccttcggtctggttgccgtcgagtttggccgaaaaggtgcattgggtatcggagctcgtgtcggtggtcttggccaaatgccaggctggtggtacaatgtggaatcaatctcaacgtcacatcttcttatgcaattcaagcttgcaattgaggctgccctcaattccaagacatccgtccgtgcaatgatgcgtgcgagatctgcaaaacagcgtttccctgttgctcaatgggttgaagatcttgagatcctgcaatctactgctatcgcggtccacaacaaagtggcgaagggtaataacaacaacaatcgacctggcacttcttctggagtcagcactttcagtggagccctgtcaccttcaccttctatgactcaactcggaagcccacttgcttcacccggcctgaactctccatacacgcattctagggacagcagctattccttcaaccaaatgaacaaccttgcccctcaaaagaaggtcagctacagcgcagatacaaacctggacgacatggagaaaccaaagtcgggactgagccgttctctttccctgggtgttcactcaggtcctggtcatgctggacgtcgcagagcagcaaaagaggctggtatctcagaaagcgatgaaaacggagccactgatgccgaaggcgaggatagcagcgacgaagacactgcccgcaccgtgtttggcgatgacgaatacactctcactccggctcaagtcgaggcagggcgacgagcccaggctgctcaaagagaccgtcctcaaaacctgccttctccaagccaggagtctttacatcccaggttcatgcttcctttggaaagcccgggatctccgggcacaccaccgagcgcggacagcctccttcttcctccccagccatttggccagtccaatcgtttcagcagcgcatccgttctctctctggactctgttgtcggcaacaagacagacttcaagctacagaaggttgatcctttcttcacagatagcactggcgagtactacaggacgtttgataaaaagttggatgccctgaacggatctaactccgagtcgcaactttgtatcgaagagttcttggtcaagagcgagcaacagtggttcgacaggttccgcaatgccagactgggtcgtaccaaatctcccacaccatcgattcgacactcatcaaggaacactgataccccagacaatatgttctacagtgacgatctcgtctccaacattaatagcaacgaagaaaatcatttccaggatgatgagttccttctcggaaaggactatgtccctcccagtggacttaagaaatggatgcagatcaaaattggagactggccggtctactccattttcctcgctctaggccagatcatcgccgcaaactcataccaaatcactctactcaccggtgaagttggccagaccgcggataagttgtatggaattgcaacgacatatgccattgcatccatgtgctggtggctcgtgtaccgctacttcaagtctgtcgtttgtctttctactccgtggttcctatatgcttttgcattcctcctgattggatctgctcactggcaagatgattccttcagtcggggatggatccagaatgtcggtaccggtttctacgccgcggcctccgctagtggatctatcttcttcgcttcaaactttggtgatgagggaggtgctccagttgaaacctggattttccgcgcctgtgtcattcaaggtattcagcaggcatacgttattgccctctggtactggggttcgacaatgaccaaggcttcttcagagggtctcttgagcgctgagtcaggcattgccaatagctggaaaatgaggtgaatagccccgtacactgatctccttccttactttactaacattactccagtgcgatttgttatcctatcactgtcttcctgtgtttcgtaggcattctgttggctttgggacttcccaactactaccgacagaagcctggcaaggtgccgtccttctacaagtcccttttccggagaaagatcgtcgcttggaacttcgtcgcggtcatcctgcagaacttcttcctgagcgcaccatacggtcgaaactggagttgtaagttcaatcttcccaatcgaactctggcataccgatcagtactaacattcctctctcccagtcctatggggttcctcgcacgcccacgcatggcagatcgtcatcctctgcatcgtcttcttcggcgttatctggtgtatattcctcttcgtcgttagcaaattctccaaacgacacagttggttccttcccgttttcgcctgcggcctgggcgcaccccgcttcatccaaatctggtgggccatctcgggcatcgggtactatctcccctgggctgggagttatacttccggcgcgctggtctctcgcagtctctggctatggctcggcgtgttggattctatccaaggtcttggattcggtatcatcctcctacagactctcactcgagtccacatgtgtttcgctctcattgcatctcaggtgctgggttccattgcgactatctgcgcccgagctttcggaccgaacagcgtaggccccggtccaatttctcctgacatgactaagggcgcccattccttggctaatggctggttttgggttgctttgttctgtcagttgttgatctggtatgttgctccttgcttgtctcgttcagcggaattatttctaacatttatctgcagtgctgggttcttgctgttcttccgcaaggaacaactcgccaaaccataagctcccttcatttttttggagcatttctgtttcttgtcatacaccggctacgcccatcacgatgaacatgaatgatcaaattaatctcttctgcataattgaagcatgttgtccccttgtgatctattttctttttctttttagatatcttaatgttaatattattgtactgagttcatactcagttagaatacatcaagtcctcgtagtgaaatgacgtaaagtcgtatataggtgtctaacaatgctgctttttctttatcctagtcaatgacatgaattctctcaaagagcacaagaccatccaaggctcaaattgctcgactgaatcagtccttgttttattgggcttccctaattaatggggtagtttgatgaagcttcagattcgtctttatacagttcaatttggaaataagcaacgtagtctctatactatttcgtgagcacaatgctgtcttctcctgacttacaggctcaacccccctttccaaagtccgagaaagctcttccaatgagcattattgttagccgatccctgccatactggaccatgagagttgtcgacccgagatgtcagttccatcaccaatcagcggtatacttacccgacctcacattccccactaagaccagactcgcatcttgactcttagacgcagctcaatggaattagtggatagttccgggccaatcaactccaaccccagatccggggtcagagaacagtgcggggttgagggctgttcagctcccgtgaccagtcctgatattggtattaatatcgtagaccatgtaggagactgagcccatttcattcaaaacctatcctggaattaataagcttgttgatccgaacgcattgaattcataatgtccaaaactcgagacacagagaaggacattgatggaggttgtatccatttggagtattcagatgatggaattgcacatccaaccaaggaagaatatgcacggtaaaccaacttcccagtttatcggcgaatttgttgctgaaacctccaagagtatataggaaaatcgacaggcggatcctgccgtttgtggcgttgacctatttgttatgctacctcgatcggactaatatcggtgagaaggcgaatgcttccattggaatcgttcaacagtactcttacttatgactatacaaaggaaatgcacgagtcttgaacagtggcaccggcgacgatctgatgacctctattgacatgaacgaccacgaatatcgcattgcccttatgctatttttggtggcttattctctatttgaggcaccaagcaacttagcaatgaagaaattcactcctccggtgtgagacttcgcaccctgacggtcagatgggtatattttttgctttactgacactcatgactagctggctggcatttcttgtcatttgtttcggcgccctgtgtgcaggaattggagggtcaaaaaatgcttcaacactcatggctctccgatttcttttaggtgcatccgaggctggtgtttacccgggaatgatcttttttctcagcttctggtacggaccgcgtgaacgagccatccgaatcgctgtctttctttgcagtgccacgctagcaggtgctttcgggggtatgatcattccgaacgcgatatgtcaatttatggatgctaaaacttgtttttataggtgctattgcctacggagtagctcatatgaatggtgccggaggcttacaagcatggcggtggctttttattatcgaaggtttaccatgtctcgtcctagcagttgccattttctttttcctgccaagctacccggaaaaggccaattggctcactgcggaagataaggccatcctcaaagcatcctttggaaataatgtggctcgagggtacatcacaaatctacccacaacaataactaccgaagctaatctgattctttctacagtgaggacaagctcaactgggctgatgcaaaggcgactctcaaggatcttcgcctctgggttcactatgtcctttatctttttgtcggaataggtgtttcgtccctctcattatttgctccggcaatcgttcagggaattggatacactggactccaggcgcagctcttcaccatcccaccttacgcatgcgcatatgttgtggctctcacagcggcatatatatccgatagagttgtatgccgagggttgattgctgccctgttcgggtttataggatttgttacgtttctcattcccggtgagttgtactcccattctcatactggtcattgatttctgattctcaatatagcctgcgtcccgagcccatcacttcatcttcgttacggtatgcttgtgcttagtgcatgctctgctttcgggtcgctacccccactatgtgcgtgggtttcggacaatgtccacagcactactgcggcatcggtagcaagcgggttgaatattgcatttactggaccaggccaaattataggggtgtggatctaccagagtcagcaggctcctcagtaccagacgggccatgctgtcaatgccgccagtcagttcatggcaatggtgttggcactgggcctatggatctattaccgacgacagaatgcaaagcttgctccgggtgagcagaagtgggttgcataaggtgaaattgagtgactgccagtccaagaggattacgtactgatgtcggaagatgttctactcgacagcagatcactataagagatcattacgctcgaagagcaacatggacatgagcaagtaaacaaaattatatatggagaaaatgaatatcccaaattgtgatcggtagttcagctgttgtgtcagaaaaagagagcggattgtttttctattgggcttgctattctaatgtcgatatatatctcaattgaagaatgtttatttttactacggagtaataaaccaacgaaaaatgtatattcaaatagatcagtggtaaccagtgccattctcaaacgaacaaaaacaaaaaagaagtcagactatcgaagctttaccgtaagaaatcgagcgtttaccttgttgatagttttcgaaagtcaaattcttataagacatcgttctatgtagctatatagacagtgctcgggcaaatttcgcggacatattagattattcatgtgtaaagcgagacaagttttcaatatgcaagttaaacatagttagatatctaaggctatcgaatgagtatcaaacatcaaaattttccagggagtctcattgcaccatcaagtctcagacagcatccattgagcatccggttcctaaatatctccaaaacaaacccgccgaactcttccggtttccccgctcgctttggccattcaaagtggtcctcgatagcctttcgtgctctttccggcatctttccttgagcggtcatcggagtagagaacatgtttggcgcaatagatacagctcggatgccgtatcgggataggtccctcgccaatggcaatgtcagagaccgtatggctcccttggtagccgcgtaagccacctggccttgctgcccatcgtacgctgcagccgaagataccataacaatcacacctctttcggactcatcgtcgggatcgatcgactcgggtagttgagccatgtgaggaacgacttgtcggatgaggtcgagagacccgacaaggttcacgttaatggcttgttgtaacttcgcaagttccagaggctcgaaggaggaattcataatctacatcgctttaacaccggaatcctaaatccgtgtatagaatcttggtccacgcacttttcctggagctaggatgcccgcacaacaaactaccccaccaatcggagctttcgtattctgactccactcaatggcatcactcactcccttggtgatgtctgtagtgcatgatatgtcgaccgggtagaacctcactagctcggatggaagatcttcttctgcggcgtcaataggttcagccaggtcaaacaaagcaacgcgcgcgccactatgagccaaagcctgtgctgtcgcccggcctaagccggaagatctatattcaaagtatgtcagctgggtggtgctgacgggtaaatcttgtgtcctaccccccggtgacaatgaaggtcctattttcaagctgcattttgctcgaatgctctttttgaatgtgtagtaggcctacactagttgcattgaaatccacttttataagtaatttctggtatctactcggggacctctgcctggaataaaatattacgccaagagaggtcgggtgtcgggtaattctttcggaaagtagactttcgccctcgaatggaaaatagagatggggaatgagcttgtagtcgtaatagctaaataatggggaacataaagccgaacaggtcgagggaaatgtatcgcacgtcgacccgagcattctttgctctttgttggtctgttacttcttgtagtaggcgcgcagctttaccagcatgaatgctcgcatgctcgccccctggtccatagtcggatttcaccagactcaattggcgaagcttagcaatacaccaggcaactttgaccgagtcggcgcattcggtcgcaaatgtgaacagagcccacattgctgcgctgttgagaggcgactcatcccaatcatcaatgtcagatacgaagttttcggaaatcacaattggctggtcgacactaccacgaagttctgcccatgtattatcggctgctgatctttcatctccttgtgctaaatggtcccaccatgcagctctgtataaataacaaaaattagaccaaaagcatgcccgaatcacgcagagtaatcgagaaatatctttcgcaagatgtagttgtaatgagtctttgagttgctcgaaatcggagttcaaaattacagggcggctattccaaagctggtgaagatcgttgataatctgactggcgctggcagtgacttccacttcatcttcgatggacccacgaggccgacggtggcgatccaacatagcaattttgcgaaggaactgctgtgacagacgatggaaagtgaaggcatcacgaagaatgctttcctttaatgtcggcagtgggctattggaagggcacgacgtcaacgggtctcgccgccttatctctggtcgtaaccggtcgggcggtggggataaaaggtccatttcccttgaactttgctgcaatggtgaccccgcatccgcgactgggtgcatcgacgggtttggagggccgcttatgaaaggtgatactgaggttggccgacgtgtcaaaatgccgtttcctccgaatatgacaagtttcatatcgcaaagaactagccaattcaatatttgctgtgttaacaaatcggcctcatctagatcttgtataagacaatctgcccattttatttgatgggctcgatgaatatcctccttgtcgatgagctactccatttgggtcagccaatgttcgtcaccgacgacagatgactaacctcgaagcaagtgagaagaaagagtccaattagcagctctcgacgaagagatgcagacggcttcacctttagctgctcgagcccctcgataagcgactctctggcaaatatatacagataatgagagaggttttcgccgtttcgtagagcatgtggacctttgttgtgttctgtagttgagaaaaacttgttaaagtggagctgggagagcgccacgattgcgtttgagatagtagagctgccacgggccatagccagaatctgacaacagagatcgtgccatgaggtagtatccacacttgatacagcaggaacaaacacatgctcttggaagtatcttcccaatgcatcggaacgacgagtgatgctttcatccgctccagggtcggtagttgaacgcgccgcaaagaagatattcgtggccatccggttgaaatttggaactatatctcgcaaaagattggcatctttgctagacgagttggaggtgggggcggattggtgggcattgctttcttgctcctgaagagcctcagttaccgaaggctcggtttctttggggagatggtagcgaacattctctgcggtgtgcttaattttcatattagcggaagagtcagcgatagaatctttaccgggcctcatacaggcacgtcataggttgagtttgtaacgaaaggggcagcgccatcatgacggtcatgctccaatgtgatggcatcctccaacgtcggaattgccaggccttgtggctccggtagcaaggtcgatggggaacaccataaatccagagcattccgagagaaggcgtcaaagtcaaagaacaaagcagtttctgggtaaaaggcagggttgaggctcgagtcaagatccatcaactcgtcaacgtctcggtgattggttgaagtcggtgactgatccacattctgctgactgggatgtgtgccagggctagttggtctctctgtctgccaacgcttcgatggaacccgtcgatacacacattcagctcctagtcgggtacagttggcacataccggagttccttcatcgcatctcaccttgcgcctcttgcaggtggtacagccggctcgtgatcgaggccccgatcgacccaggcgtctttctggtcggaagtcggtagatgcagttgcaggggacatttcagattgggaatgagaaatacccgaaagaatcagtttctcttatatggaagacatgagcattgccgaggtcttcgcccccacgtccttttgatgctcatcagagccaaaacgcggggttaatgagcgtcacctgatctgcagtctgcttacaacaaagacttggtctgcaactagttacagtgttctggcgaaaagaaattatcaaattatctcacaatctaacttcacgtggatttcccagagcttcgaatgtgtcggcagcccaattactaaatgcctttcgagatttcacggcctcgatatcctgcttgtttactccccttgcctccagagctgggttatatccgagacgtcgtcgtccgtcaacctgatcctggatttcagacgacaagggtgcaactttgtcatcggcacgacctaaaacagtgacaactgtagcacccccgaggcccatgttgtgctgcaggcagtatttggtctgcggtacacaacggtttgatgcccagccacgtagatgccatactaaatctacattagcataatcccctatataaatgggttgaattgaaggtacctaactcggccgtttgagcaaggcctgtcgctcccagcggatgacccttggaaatcaatccgccactgggattgatgatccatcctggagacgttcttttcgttttagaactttgatcatacgtgatgcctccaccggcgaccagcttccacccttcgccgtgtggagctaggcccaagtcttcgatcgcacacatctcgtttgtcgtaaagcaatcatgcagctcaatcacttggatatctttgggtgatagtgaagcctgcttgaaggcattctgggcagcacgtcttgtcatattggacccaatcagctcgatggcgctcgcgggctcatacaaatcccgagagtcagttgcaagggcttggcccctaatggcaattgcgcttcccttcaggtagggatgagcttgcaggaaacgctccgacactaggaccgtggcggcagctccggtctatcatattagtacacactggtgtatgcaggcggggtttgataagaatatgtacttaccgaggatggacagcattgtagccgagtaatcgatcccgacacctgtggactcgatgaaacttccttggtcgtcacagactgacgcagctgactgtatggattgttcatgccatgcgtacggttagtggaggcaatagcggcgaaatgctctgcttttgctccgttcgacccgtatttttccaggtactcagcttgggcgttggcatatagctgaggtgtccagccagctgattctgcttgaccttcgggaataaaacgcttcgaaagagccagaattcttcccaggggattctccctatccttataaatctgtggaagagcaccaggatacattttgtcaaatcccaccacaaggacacaatcagcactgccggcctgaataaactgattggccatatacaggcccgtactccctgcgctgcagtagttatgaacattgtaaatgggaactccagtcatccccagggtgtagaaaacacgctgtgcgccagcagagtcaccaaacacataacacccaactccctgatcaacatcatcatagttgattccggcatcgagtaaagctttcacacatgcggatacggcgaggttgaaataatctccctcgggattggaggaggttgcagctgattttttgggagactgaaatggggtcatccccacaccgacgatgtatactggggaggcagtcatattgattgatgtacaggaaaatgagaaggagtgcacaaattatatcgcaatatgtagattagcgagcttctcctagacccttttaaacacgcgaagtgtaccacttaatagttcccgaagaggtttacaaggccgatttacgatagcaacaactaattacttgcctccatgtcggaatgatattggaaccgagcattgtcgtcactatcttcagtcctcgaggatgagggtgctcgggtatcggataaatctcttggcgctccagcattctgctcgggtatagcacccaacagcaatctaactgaaagcctcatgaaagtttccatattcagtcacctcgctctgatatactggcaagaagtgtagtcattcgtagcaagtaagttatagtaggtcgcagtcgtgtaaagaacacagaagacagtattggggcttctataaagacccagtcaccgggagtagtagaacactggaatatgttttatcgattccgtcattttggcttaatgattgcttttcaacggcgtactcggatgaagagaggacgaatatacaccgattctccaccgcgatatgataatgtaagccatggataaagtacatattctagcctaaaaaccctccaattcagttgattcaatatttcaatcgtgtaaaaatgctctcaaatcagccttctattgtctatggcccgtcagctccgatcccggtgtcaatgacatttggggaccttctatcctaccatgcacaacacaggccagataaccatgcgattatatcgcatcatcaaaatatccgcttgacctatagtcagctcgaagagcgtagcacgtcgctagcaaaggcattctccagctataacgttagccggggtgatactgtggccatcatgttgggcagtcgaacggaatacatcgaagtaagtagtactccacgaataaatagcacctgaagtgtactgactatctagacattttttgcgtgtgcgaaattaggtgcatcgcttgtccttcttaatttcgcctttgttttagaggagatcgttgataccttgactccaattggtaagggattatttctcattctactaattgtcgtagctgatgcggttctcaatagccccgaagcttctcgttatgacacccagctttgggaaatttcaatacgagaacattctattaaagctttcaaaaatgcttccttctttgcaagctgtggtccttgtggatccgtacaaactgaaggctcaaagcctaggagataaaatggtctcctatgaagtcttactcaagcaaaattttgccacgagcttgcctggcaatgtttcgcctcatgacattgtcaacatacaattcacatctggcagcactgggactcccaaagcagctgcacttagccactacaacattatgaattgtggcaagaatatcagtgcccagatgagcataagcgataaggaccgagtctgtcttcctgtgcctttgttccacagttttggacttatcattggtaagctgctcatcctctgtgagggttctgataatgctaaaattgcgtgaaggtatttgcaccagcacgtggagtggatcaaccattgtattcccatcggaaacgttcgacgccgatgcggtgttgaaatgcattgagggatatagatgcactggcatttatggagtcaccacaatgttcatcgaggagatgaagaacccgaagtttgcttgcaccgatcgctcatctctgaagttagacttctgtccaataacgctcgtcgaccttttaaaactgactcgtactagatttggaatcatggcaggatcagcaatgccacaggatttgctggaaaaggttgcaacctccttcccagttcctcgcctctacacaaattgggggatgacggaactttcgtccattaccactatgacacaccacagcgatccaacccccaatcgtcttcacacagccggtcgccttttcccgaacttcattgggaaaatcgtggagcctaacacaggccgagttctgccgtggggacagaagggagagattgtgatctctggatatggagtcatgggtggagggtatcttcgaaatccatccaagaccgcagaagcgatgagacaacacgtggaagacttggagccccatggagtcggacctgtggacagcgagggaaatcttagaacgtggatgcacacaggagatgaagggtattttgacaaagatggatattttgtgatcactggacgcatcaaagacatcatcattcgcggaggagagaacatttccccggtagaaatcgaagcacgactttcctcccacggggcgattgtccaggcttctgttgttggggttccgaatgctcgacttggagaagaaatagctgccttcgttgaactaaccaacggccatgctaaacctaccgatgaagagctccagaaatgggtgcgagcaagtctcagtcgcttcaaaacaccaaaacacttttggtggataggtagtccccagcatggcgttccccgagaatggccgaagactgcatctggaaagcttagaaaaccggacttacgggaagtcgcgaaaggtgagttaaatttgtttccctccgattttccctagacaattacactgacggtatcgggtatgacagagttgttggaggaggtgccggaaagagctcgactttagagagtcgggtctaatttttcctgtttctcctcttgagtttttccatgtctaccgtgactcgatcatgcgtcttcaatatcaagagcccagagtgcatgtcacagccactcagccaccaccacgcaaatcttctgtatgaagatccgccccacgggtgtggatcgcgatcgtcaactttaaagcttctttgttgtgccacatcttggcggatttggctgtaggggaataatattcgtaggaaaggcgtcacattaagttgatcgatgagcccgggcaggggggacaggagagatggcctcggctggagaacaagctgttgtgatggcctcaggcccgaagccctccacagttaactaccatctccttgtggtcatacaagcctagcaggacttagcaataaacaaaccaccattgagaatcaaaaataagactgtatccctgtagaaaaattaatattattctattataattaggagaaaagttaaaaaggcaagctgtgagtctgattgccagtcacatcaagtctatataaatcccacaccaagaaacatggtcatccatcatctggaaactctgtcaccagtggtaggtatcggctttgccagccgcagacaccaacacagtgcatattcgagcggaagtagcaagataagaattttgttgaagcggtaggacagggtaaccgtaaaaatcgccaccacagcatcgagccagtagtgatttgcggtagcgacgatgacactgaggaccagaatcgggtacaatatagcgagtgccaaaaagccaaactccgtcatgtaggacttctgcgttggcctgcgctggagcctttgcagaaatccggagtggtgaagaaaggtgcacccgatcacaaaggcataggtaaagtgcaggctgggcatggccgcgaattggttcacggactttccgccaacccagatgctttcggcattgccttggcgcacggtgtcgtagaagccatacgagtctggaaggagtcgtggcggcatgagtgggtagacacagaataccaagaaagcggcgagatttccaagtgtcattgtccgccgtgcggtcgcgaaagacgcatggttcttggcaacataatagtaccaggagaggaatctgttcatttggtcaactgactattcaaattggaactatatcaagtgaagggttactcacagcactgtgccgggaatgtgtattaatgaataaatgcgattaaagatagtcaagatcgacggatgattttgaataaaaaaagattggaaatcggcttcgttgatcggaaatatccaagacgcggttgtatgttcaaagttgagaatgtcgatggcgtggccccgcgcaacctcgacaacacctatctcggcgggagaaagccactgcgccgttgctttcgtcacagaatagaatagatagttcatactccagtagaacatctcaaccaagaaaggtagtttctgcagaattctactgtgaatgtggtgcgcccagcgagaagagtctccggtcttgacattgatcccgcatacagtttctgatttgggttgcagactgtcgatggaataagcatcgccctcctccagaatggcgtagcttcctaggtattgagattcattggaactcttgctagaatccctgcgacgattcacaatcaatgacccaaccataatacccacaacgacctgttcacgacattaatacacctttagcgatatacgcagtatcaaacttacaataggttcaagccatgcgtgtgacgctaattgtggcttacccagatcgggtgtatcctgagtaaaattggtgctgggcaccatacttgcaatggtagaagcttttcagaaatatacaaggtaaagcctccaaagacgctagagaatagaacaaaattgaagcaaatcaagattcaaaaagaggaaaagggagacaagacaggctaaatggatgctgtcgtgtgccctctaaccacgttattccaattatgcataatacagacgatacaataataatatacgagtacgaacttcggacggcggaatgattacgggaccgaatcccgaggcgggacatagcaaggagattatattggtatttgccctcctttaacaggccgagctcgttaacgggaataaatgcgttcatttacagtttgtatttccataatgatctctctatagaacacatttagcagaaactcagtccatttcttggagagaaaaaaaccagaaaataaaagctcttttactgccaatgacaattccaacgccatggcttggatggagtcgtaagggaggcgttcagctagtcccgaatagaacagacaagagtcccgattggcttcttcacattacgtacgtacctaggtatgcctccttgatccaaagcgggaacatatcgacctatcacgacatattatccgctctatccaatgattgtactcgcactcacctgattaccaggatattgtaggtccagctttagatatgagacacggacaaaccactgtccgaagtcgaagccaattattcgtagggagtacatactgtacagaaaggtctggatgcatatctgtaaggctgtaaaccttatcgatcttggaatgtgctttgtttgcattctaactcaaaatccgagcttgaagggaatctgtaattccaatactacactgattatttccatcctggggcagacccggagccatactttggaatgtgtgtttctaacaataacagccacttggaaactcgactgatgagaggaaaggcaatgtaagctgacagagatttatggatacataagatcatgccagttcccatgtggagtaaatcgaactcaaccttggaagttgggactagacgttgtcttgaacctcggcttgattttttatgcaaacgtcatcattgttgaccttgcaaatagccccctaagtttcgaagttctatactaaaaaaaagaagaaaagaaaaacaatgacctgattaatacctgattaataggggttcgtgaaaatatgccctaaagcaaggttagtaacctagggttggtagtttgttgatgtagggttgaaagaagggttgaaaatagggacgactaaatgtggataagtcaagctccccatgggaacctggcgcatctaggctcagatttcctatggactggtccgtagatgtgttaaatcttgccttcaaactgctgatccgcttgtggcttaccgtcctaccaacttatgcagttcatggtcatggattcattcccgaggtcgattccgaggtccggaggagcatccatggatgtcaactccgtagacggtgtgtattcataattaatactccaaattcataattcaactttaatgtggcaaactcgaatttgtgtgcacgtaatcgtctccagcccgacccacgttcacgagatggatccgtttcactatacggagtataaattttcagcttacacaaactacgaatctttgtggcacgcctaactatgcgaaaggtaaatgggcattaagattgtatattttcttcacgctccaactggccaaagcgaaaataaggtatgtaaaatcatttatcagatctaattgagagcaatcgttgctcgtttgtatactcaatcatatggtaagtgaagaaaatccaaaatattacgactatgtaccctttgtatgggtgtggcatataaaagatactcgtgtaagacaacatgcaaataagacaaataaactgcgcttaaccaatccttgtccctctgccacgcgtttctgactccttatcatgtttaaggttttcaatttattgcacaatgccattgtatgaagcaaggctattatataacaattcaataaatgacgattaactacccattttgagatgtagttagacatagtaagaaatatttgcctattataaatcaaaaaagagcaaaaaagggttagaactatcccgtgacgatcaatgttatcaaataagacatttgaacccctatagcaatcaatttcaccctaacaacctctggcgggaacggaagttggtatccccggccgggtacgagtatcccgagtagttttcaacatccggagaaactgacctgtccgtgatattttaccctggatatggggtgttccgatcgaaattgctttgttggagcttgtatctcgaatacattctccttggcacctaggtcgagagagccagtcagaaagggcaagtctagcccctagcatgggatttgcttgggagggctcagccggttcggctcgctagggaaagagattgaagtggagaagagaaaactatgataagctcgcaacctttacctgcgatgttatcatatgcagatcaagttcaatgcgctttggactcagttctccacgtcttctccccgtttccaaattatgccaacaagagacgttgacgaaaaagacgctggctaaaggctgcttggggcctgaggcaataaggctaaccattttctaagaagctgacaaccttgaagataactgcttaggtgtgttttggaatcattgcctacatgtgaacggtctgtggttggaagtatgcaaacttatgctcacagtcggaatgatgtctttccattttcataaccactccaatcctagatatacccatgcaaggtgattctcaaaactgataatacagacagaaacgataactttggctatttaataggcagatataataatcttgacgttgtaggtgctcgatttcactgtctgccgcagatgtgtagttgccgcaaaccctacggagtacatcgcacctgctttatgcaatgatgccaatgttatatacccgacgcaggcaccatgactctctctacaactaactagcctcagtcagcaagtcatacattcgcttccagcccttccatcatgaaaaactgggactacgggaagctcgccattgccactgccgcaattctcggagtcctcacactcggcgcactgatatacttgctgctatggtacgttcgacgaggactgcgcgcccggcggcttcgtcgccaggagaaggagaatgaccagtttgaccagtccgcagtgtccctcgccgaggacacaagcaggaccctagatcacttcctcatgaaggatattcaacctgagcggagttcaatcatcttcagcagaagccgatccccatccatcaacatcgtcattgacgacgcggacgctaatcgctgcaagtcttcccctcagccttatctcccagaacatcacactgcagcttcttcatctgcagttacccacgtcctctcacagatctcgactcaaaaatctggtcctgatgacccacggactcagtggagcagctcgggacagcgttcgtctagtacgacgccgcgggcatccacctcgtcgtccgtcgtcccagcatcgcaatcatcccaggtttggactacgacttctggtagcacaccgtcggagcagactcagagtgtttcagcacagcactcgtcgaccacgacacctcgagcatccatctcctcgtctgtcgtcccaacagcggggtcctctcaggtctggaccacgacctctgccgagactgagacgttttcgctccttagtcaatcctcgaactactcgcaccaccctcaaagccccattggcccatccacctcccgcagctcacagatatatacacgtcgttcgaatgcttctgctgcatcgagccgtccgtccagtgggggtatcttgcagtctgcatcccgtatgttcaatgaagcagaggctgctcggatggcttattcgaggaatatcgactctgttggatcaatgagtcccacttcccccgtctctccggtgttagtggatgtttcagctgataacaagctcccccaatggacctccgtaccgcctaccccctttcctttcagtcagctctgatctttgatgacacccagtgggctttttgaattgatattgcttatttgccgttgattcagacccgacgaggacggattgagatggattcaggttccatgcatgactagggttccattccttctatttgcattcccttcaaaccgttgatgtctttggaagtcaatgttgttaatcaaattttctttactgatacctctgatccattatgtacagcgtccgggtcttttttagggctacaatgtttactttttattcataaagaagtgcagtgatgatgagttagagatgaacctaaaaatatattccattgtgagtagttgaacgtgaaagaatcgagcaaaatatatagaactaacacccaaggcctgggttcatgaattacttgcgttgatttcttttgcgctttttagcgaggacgaggcctttatttttcgtgcgccaatcccagtgggtacttcctcctttcattcggcgtgtcatgagttccagtacagcaatggaggatctgcctctagatagaaacattgctgataccagcgacatcggtaaactcacgatgtctgtccaaaaaagctgctgttttggcatgacggtccgctttcatttccgacgttctaggaacccgccagaactgaacgctcatccccctctcctcccacatttccacctccccgagaagacactcccaaaggtcccggttcctgattggttccccagcacgtgtaacccagctgtactgtatccaatcgtatacctctctcgtgataccgtccactacatattccgagtctgtcgcaatgatcaaacgactaaagccatccatagcccagtctcgatatctcagagctgcaatgacggcgcgaatctgcgcgcggtcgtttgtcagcgtgtgatgttggccagtgggccctttgtactcgagaggaaagcgtgcgtaaccagatgcagactcgttgtagacaaaggaacaacccgctctggcgttcggtctgccgttgtccatacacgtgccgtctgttaagatgaggaattcatcctcgacggatcggttgtcgtgattcagacgaatgaaccggtggactcggtccgttgctgtgactttggggcaatgtgggaacaatgactgcggcgtatcatttggatgcggaggagcgaactctgtggggatgacgcgaccactaccgactctaagctccgtatagagtcgagggagcatgtggggcgcgaagtattgcgcgggattcacttggtggaaggacatggtggtttggtaggccatagcttcaaggtttagcatctgccggtggccttagtatatcaggcacaaaatgtaccttcaaatacagatgaaggtgtcggagttggataatagggagatgacgggaacacgacaaaatggtagcgagcctcgctccttccatacttgtcctggatgcctcaggccgggatgacaaaaatcaataatcattagttatatttcttggtgaactaccaaaaaaataagtaaagggaatctccacgcgcctcgctattccagtactggacacgctgcagaggtaaaaaccgacaaagattaaaagcacatacagaagcaaagttctcgaacacatgtccgccatgagatatacaggaaatgatagctgacacaaaaagaatgtggaagtaagtccttgagatctatccggatatatcatcttcatcttcatgcattcgtatcgcgcacactgcgtaggcaccgttcaagccgtttgccacgctccttttcgcgtacaagagtatccttgacaaacgatcggatggcgtcacggccaaccctttcccgccaggaggtccagccagcgagttcgcccaccacgacatccttgttccacgagatctctttcgccaaccgagtagactcggattcgccctcacgaaccttctgttcgaggtcacggactgacttctggcgagactcttcgaagcctggcaggtttatattgaatttgcgggggagggaagaggagaggagcgaggagcgagagcgagaggtatggcggtttgttgaagagagggaggacatgagggccagtggacgagatagagatatcagaatggcggctgttgtgttgtcgactgaggaaagagctgccaaatactgcaggagaggggaggagtcagatctagaggtcgataggtaggtggcgtaacgagcaaaggcctcaatgtgagagatcggaagtgcattagtgggcgcccggagtgtagaaaggacagatgagcatatcatcaccgcatcagcgagatcggaggttgcattatgcaatgcgtgccctcggcgaatcagcgaacgcgtattaacgtgtacaccgcgcactatgtcctgggcgtgagtgataaactgctctgtgtcgcgcatgccctccagtgagaccggcgcatattcgtccgcgatagtctctgtgagcacggcagccttgcggtacgatcgatctgcaaccatctcaggctgaagttctggaacgaggaagaactcccacagcatttcgtgagttgaaaaggttggatgagcgaggagcgtcttaaggaaccgatccagcctttcctggagatcatggagcacagaccgtgatggcttcgagtggatctggaatggattccggaaatccgagagagatggcatgtaagatgccggatgctccactgcaagccatttagccaaattctcaaagtcggagaaattacggcgacaggtcgtaacggtgtatgttgtcgatccgggtcgcgacgatgccacggattcggtgggaggaaatggcgcgcctgatttgagaatgaatcgcacggttgcgtcctcgacgaagtacgatcgcacgaccgttgtgacccgacccgaaggatctccgcaagccgatggaggatgggacaacaagatcaaatcatcgatgcgattccgcacctcatcatccttggctaattccaccgcagtcaaaccacgggcttctttaatatgaacgtcgactcttgggtctaagaagagaatgcggacttgatcaactcgcccgtacttgctggccatcatcaacggtgtaaatctcttgtcgttggtcgcgttgggatcgcaatcgctgtcctgcaatatgcgcctggtgatatcagggtcaccaacaatatgcagcagtgtgttccccttcatatcgacatgatcatcaagctgaagcggtttattgtcgccctgtgcccattgcgctgcagtcaaagcggcttggaccattgatttgtattctggatgatcatacgaccgacagagtgcaaagagcggggtttgtccatgtttgtctcgttgtcgccatgggataatgctgccaagtctctctagtagcgagggtgtgctgaaaagataatgagcaacggtgcgaccgtgaacgtcggatttggtcaaataggacgcaaccacgcttatatctgtctttgcaaataggaagtccagaaggatcttaactatctcggtgtgtgcgagttgcaccgcagcgtttaataacgtggtcccatcggtattggtgtcttgaatgatttcttccaaggggtagtattcttctagagtcaacaggtacttcaaagcctcggtctgacgggcctctactgccatcatcggtatggaatgaccagcaggatcttgggtttttgtcaaggtctcaatcgaattgtcaccttcaattccactggccatggatccgagggttgcagtcctggagatgaatgagacggctgatgactccgatagactgcgaacgtccattgaaaccttcttaactggacggtgcgggtgagattcttgtataatcgagagatcatcccaagtttggaatgggaaaacatgggacagcggtggtgcctccacaacagcttcatccaggtatgagtcgccattcgtatgactcgtgtaagagtgatcaagagggagatcatctggctcgtcagcttcatctgtctggaacagtacagactttcgccccggttccggtggactcgtgtcatctattgcgccatgatcctcgttcggttccagtatagatttcatatccgatattctgcccgcttttgttgcttgccacaaacgtctgttccgagcgctggcacgacgtaatccggcggaatcggtgacgagatacatcaaaacagcttcaaatgtacttagagcataccccatctcgccattatcaacgtcgtcgatgtaaataaaatgctgcatatacaacagtcgagcttggagatgccgtgtttgagaacgaatgacaacaataagcaacaacgagactaagacatcggcgttgatcgtgacagaggaagttcccttctcagatggcgagccgtccagttgatcataacttcccgggaaggagataaccttgactgttccaaggagagtattcagcatatcatggggacatcgagcgtcattaatcttccgaaattcttccacagctcgcccaagtcggcgaatcagttctcgcttcccttcacgtccaccttcaacagagattccgacttgggatacatcgatgctctccatctggcgaatgcgggaatccagctctgtgtcctctggttggcggaatgaacacagacgagggaaaagcagcggctcgtgaacttgctcggcgacataacgttctatcagccgctccactagaggaccggtgaggtcagtggttgcaccaagcaacgataattgctgcttgtcaacgaggcggaaaagatcaatggcagcagtcaccgcggtttctaagctccggcgcatgagatcttcgtcgtcctcgaagtactcctcagaattgaatggcaatcgccctctgctgcgtgatgaccagctgcggatagaagagctttcgtctgtaaaagactcgacgcgggacaacttgtggacacgttcactgccggatgcagatggcgaccgagaaggtggaggtggcaatggtttaccaagttcttttccaaactctttgaataatcgttccaggcccggatgcatctgtctcgcaatcatcgggtaattggctagcagttccccgaaagatttgatctcttgttttggtggtgtcccaattgaatctccgtttccatacctcctatctggtgtagtctgtccgaccacgctggcgccgcttccagggactacggctggtatgatcttcgcagggtcatatgttccgatcaacgggcgagagatgtagtaaatcagccatgggcgcgattcgttggacgggttgtaatatagcacgtcggaaagcagttgggcttgtgtgagtgacttgaatcctgatagagatgatctctgttagctaacatatatgggcgagtgcattcaccagcaagtgctctcacccttgttgctgtatactgagttgtccttgatgatcaccgtccggccattaaacgtggtcacctgctttgctttgcctctgttttctcgcatattgctctcttctttcgaattcgcagagacagtgtggattgggatgcggagcacatggctccctaaaaattcctctgacgcgcaaagatcggaatatagcaggttcgactcccggtcgcgtgaaccgatgagagactctgtcgttggaactagcaagacctaaggcgtacacacaagatcaattagccactccggatgatccgccgacatatgcacagcttccacctacatgattctcaaccggtacacactggcccgggacagtgcttcgaaagaaggcacggaggaaagggtttagagggtgcatccaaacggttttggacggcccagtcgaaagactccagcaatcatcaagccgtccgtctcaaatctccgaagcaggggatatgtgcgccgtaagatttcgcggggaaggacagctcgcatccaacaggcagcggcgcagtatgaagccagagcgggtcgttgaattaagtggacagagctgcaaataagctcgaacaaaagcacaatgctagatcgcagaaaacaagaagccacaaatataagagttgacgcagaagcacatgtgtcgcgggtaaatccagaacgtgatcgacaagttgatgggcgctatactgcattgggtaattatttcattcaataaactgcaacctcgggttcctcttgcgtagcttcggagatttcctaattccataagatatttcatcatggcagaaatcatgcatcgggttcaatctccatttacagagaggtgttgcaagtggagtttgtgtagtcctgtcatgagatttctaatatacagagaatagatggcgacaagcatgccattagataaaaacacaaaaagcacagccggtctctccacacaatgcaattcagtacacttgtgctgcacacaagcagccaacccaaaataaaaacatagtctctcctgtggagggagatcaacccagtctacgcacgtgtctgctgcgagtaccaccgaacttcagacgagtcgagtcggtcactcgcgcaacaagcccccgaatgtgtcgtccttcgtggcccagcaggacctttgtaaatgcatcgcggccctttccgaacccacggtacacgacctccaaccgctcgatctccatcaggaagcccttttcctgaatctgattcataacatgagcagacagttggtatgccgggtcaaagccggagcgaccagctttacggaaacctatttgaccgcatccgatagacataagagggctcccgttcggtcgagtcaaggtgaggattgtgttgtgcttgtggcagtagacgtgcaggtggtggggaggagctcggtcggcgtaggggttcttgaccatgtcggcttcgaggctttcagccatcctggagtagtcagagctaccgcgcgaggatagggctggcttcttgccctgcatcatttgggtgattgcagaaagcggcgacgaggaatctgaaggtgactcgggttctcgcttcagaatctgtttctcaatgacgctaccttcactgcgcgcagaaaacgccgtgctttggtgggagaataaacgtgtggtgctcaaggaggagattcgcgggtgagattggcggcatactgatggcaatgccttggtcaacttgctcatcgaaaaggagctcatcgtggtacagcgacaaaggacgaatacgagatgagggaaagagcgatgggttatagaaagccggatcaattgaacaccaatcaccaatccaatgtgttgaaatggccacaaagcgcgggtggtgtagagccgttgccggaccgaagggaaacgctggaagtttttcgaagtcttggcatctgcactttttcccttcccggagatctttacctctctccccatcaccttcttcatatcgcgtccaggctgggctggaatccatcttgcctctaccctcatatttaattctatttgttctcctatcccttcaacgctccagaggatgattccggctaggatgtctgcggcacgagccgtttccttgcggtcccaagcaccgtctctcagagtatcatctcaccggttgtctcgcgccggatcatattcaaccgtctcagctcaagcattcgcgcactctcttaaaagccaccgtgctgtcctacaatccccttcccaccccatccctcaacttgtttcgccgttcgccgctctccctttgacgcggtctttccacgccgcaacctctctttggcaacagcagaagcaacaggaaaaaaagcagggtgaggaagagaaggctgaatcacagggcgaggagtctaaggaagagaaaaaagagaagcaggaagagaaggttccgccaccaccccacggagacaagtctccttggcaggtattccgtgagactctgcagaccgagttcaaggcctccaaggaatgggaggaatctactaaagcgctggcatcctcagctcaccaatttactgaaaatgagagcgtcaggcgtgcgcgcgctgcttacgaggctgcgtcaagcgccacaacctctaaaacttccacagccattaagacgaccggtcaagtcattggaaagggagctgcttggacatggaacaccagtgttgtgaagggcgttcggaagggtgtcaacgcaaccggagagaccctcgagaaggccacaagacctgttcgagaaaccgaagcatacaagagtgtgaaggacgccatcgatgatggcagcagctcacgctacggtggttgggtcgagaaggaggaacgtcgcaagcagcgacagcgtcgagaggagcaagagctcaaggctggaaagtctctccacgttgaggagagagttgaagatcccaagtaagtttagatgatgacaagggttcaatctggcgttcctgactcatttatctccagtgccggtaccaacgtcactcttcacaaagattctgcctggaaagattcctggagagacttcaaggactccaaccccatgatgcagaagctcttctcgatcaaggaaaactacaacgagtccgagaaccccctgatcagcacagcacgcagcatttccgatcgcgttgctggtttcttcgccgaaaacgagaccgccatggtcatcaagaagttccgggagattgaccccaacttccagatggagcctttcttgcgcgagatgcgtgactacatgttgccagaagtcctcgacgcttatgtgaagggagatattgagacactcaagctctggctttcagatgctcagttccacgtctacgctgctctcgcaaagcaatacaccactgccggactcaagtcggatggtcgtattttagatatccgtggcgtggatatttctcacgcccgtatcttggacccaggcgacattcctgtgttcgtcgttacttgtcgcacccaggaggttcacgtttaccgcaagatcaagacgggtgaactagccgctggtacggatgacaaggtgcaactggtcacctacgccattggattgactcgtatccctgatgaagtcaacaaccccgaaactcggggctggagattgatcgagctgcagaaggctgcccgtgactacatctaagggcgcaatctgtacctctccattctatactgccacatttttctctatcatattgtcggcatatttcttcgtggacctcaccccttctgcatcttgacttccactccaccccctttcgactgtacaatacaactgtttggtattaagccaggtagatcctggctcctattacggttatgcctgttccagtgactgccaatttgggccttcgctggttaatcggattttttttcttcatgtattaatgcttcgtccggtctgacattttgccccaagtcttacttactccgaggacttacggctcagtccgctcaaatctgaatgttccatctttcccatagactagggtgcgttggattttatctgaaggcatttctctgggtctcgaggtgttctgctggcgtctgtgcattttattttcactctcccctcgccaccgtgtatgactgcattgggttgttggttttggtttctgttggggccgtaatcggtcaccaagatatgaaaattcttgaaaatcgtgtaaatatataaacagacatttctagcttgatgattttgatatcttgtagttctctctcgagtaccagctacccgtagtactccttccatgaacgtaaacgagctaaagccgtcatttatatagtggacccaactctcaatccgtaatactgaccaacccgaatgaatgccatgctaaagttgtatgttggtgaaatagatttcctacgtacctgtacccgggaaattacttcaaacccagtataaatggaggaattcttgaggattgctttcaatcgacatttgaccgaagtaaaaatggcggttgagggtggatctacgtggacatgagcaagagaaaaggaagtgagtttttttttctttctaaaaaaacgctttgaaaagtgaatttgctacatggtatatcagattgcgtctgtcaatttctcaatcgtcggaccggaaatttagtgcgggccttcagagccagtaccagcaccggcaccagcgccagcgccaccaccacccatcatattccgagccctgtgagctagatgtcagtaatgtgatttcagaaaccctggtatttcataaacttacatatttgcgaggttggggtcgctcatcaggctggacatgtcaggcatgccgccaccctggccaaagctttcagccatctggcggaggcggggattgctcatcaggttgccgagcatatcggggttgctcatgagattttgcgccatggtggagaacatcgggttgctcatcagggaacccaagtcgggcatgccaccagcaccaccagcgccgcctccaccaagcatgctggccagggaagacaggtcaggcatgccaccaggaccaccacgcgaggcacccggagcagtgtccagttcctcggacgggggctcggtggttcgggtggtctcctcaagcttccgtgtcgatgtctccaagccacgcttcatggcctcactaccgccgttgccttccgcctcaatgcccttctcatatgcctccttggcggcatggtagtctcccatatcgaagcgagcaagacccagacggctccacgccttggagtatttgggatcggcggcagcagcaacctctgcatcactcgcggccttctcatgctggcctgaagcggaaaatgcggcggcgcggttggagagatagatggggttggccggggcaatctcgagagccttggtgtattgctcaatggcaccggcgtagtccttcttagccatgagagcattaccctcggacttcagcttatcggattccggtgtgggcacaccggccttaggcttctcttcctgggaattttgagctcctgcggtcgattgcggggtcgacttgttgcgcaacttttcgtagacgttgtagattccggccaacgattgtccacccacagcatccttcacagcagcctcgtcggtagggtcaactttgaaggtatccgcgatacaagactgggcgatttcaatagactcggcatcatcggcggtgagggtaccatctttcaggctggagccgaggaaatcgatgatggccaaagccaagcgcttgttgctttctgttggagcctatcatgaatcagtaccatgaaacaaccaccacaggcgagaagcttaccattatagcaatatttcaataaataatgcgaatcaaagataaacagcgttcaggagtgatcaagatggaagaaaaaacaggcgaggcaatgcggggggaaagcttttgcacgtgatcgtagcttatcgtttccccggtctggttccatgcctggactctatttcttaacatttgaatttgtgctttgggggttcttgtctgctttgctgacggagaattggttccttggagatgactccatgtgagcttcattatccatcttaacccctgaaactgacctgagccatgtactggcctcatggagttcccagggtctacgcggtcaatggacccgatattgcctatacctcctctgatgaggatcgcgaactcctgaatacttcttcaaccaatgatggcaatgcctttgacgatggcgcggaaataagagagagcgacggtcaacatgagtccgcggagacccagccccatgagtcgcaaacaaagtcctccctggacactggcaaatcagaatggggagacgaagctattagaggcatttgtgtttctcggtctgggcagatgtttgccacaatgtcagagtcatcaattgctctttggcagacacgggtatgtgcacaatgccgttatagtccatgggggaagtttgggctggtgactgacaattctggcagcctacagcagtagttacagcaatctctcgatctcagttctcgttgaaaacatatggtccgaatgtttcactccttatgcacccaaattcgacgatcctggttgtacagaccctcaacgggtacctgctcacgtactcggtgacttccgattcgacaacccaagtctaccagcagcgattcgatcattccacaaacccccgtcgacaacaattggcccggttttcagcagttgaagaggccaatgtggttggggacatcaacattcgtttccgaatggctatcaagatcgagtcgggaatcgtcaaggcgctggcgctagatcaagaacttgttgtcgccaccgtgaaacctccagctatacaatgcattcggtggacacccgaggcgggaggagcacaaaccacatccgaactactgagtcgtatcctagggatctcgaagaaggtctcgatcgtggacatggtttacgatcgtgcgatgaatctcctcatttggattaccagcagtggccagacatatgccgtgcaacgagattcaggctcacagcaggatcctgaagcagcaaagaaactcttccacggacattgcttccatgatccgaaggatgacagcgaaaaggccgtgaaagttactgtaaatgcacgcttctctctgttgactgtgagctgttcaaacggtgatatcttagtttacaccgcaaaggattacatgggcaacattccactttcacaaaagctccatctaccagcgtcgcccacaaccactggggctttgactttcatgagctattctccggatggatattgtctctttgctggtttcgaaaacggctggacaacatggagtgtttttgggaagccaggaggaaacagcttttccgtagacactacgttggcgaccgccaattcggaggattggttaactggtgtgtcagacgggtgttggattggcggcgggtcggacatcattctgtctggacaaaacgaccgtcgcctgtgggtcctggagacagctcgcagtgctttgactggttgtttttcgtctgcaaacttggcccgaggcctactgcagaccggtactgagtttatcctctaccgcggtcatgatcttccagatctcatgacaatatcaggaaaggattcattgtggcatcatggccagtatccaccggcatatcttcattcacagtggccgattcgatcttgcgtcgtgtctcaggatggacggtatgtggcaattgcaggacggcgtggcctcgcacattacagtgtcaatagcggccgatggaaggtattcgaggattcaaaagccgagagctccttcgctgtgcgaggaggtatgtgttggtatggccacatactgatcgcagcggtggaaagtgacgggtcatacgaggtactacatatctccccctgttttggtgcatgactgatttgaattgaaagattcgtctttattcgcgcgaggcttctctcggtaacaattcgattatgttcatcgaatatctcccatcaccagttgtgttcattggaacctctggggaagattctctcttggtttatacatacgataacattctgtaccattatatcattaattcgacacaacctcaaatcactcttgtccctgttggacagattgctttccatggaattgttcgggcgccctctcgcgtccgatcgatcagctgggtattgcccgaggagcagatgcgtgagttaacttgtttttatgcagttgttcgagcacaacactgacagcaaagcaggaaacggtgatccatctcaagatgtgaaggtcgcatctgtgcttcttcttgtggacggcaatttggtattgttgcagcccacggtctcagatgccggtgacctcaaatacgacatgcgcgtcatatcccatgatgtcgagtattatatcttgatgcgcgaccaaatctccttcaacttttccttgcaggttgatgaatccctacctgctagtccttcggttgatatagcactagagccacctcatagtagtctgtcgctcagggactctctttggatgttccgtggtcaaaacctgcttgcttggaatgatgttcaagatgtattgcgggaggagatggtgccggcaccactcgacatccccctggacttttatccattgtctgtgttgctgaacaaaggaattgtgctcggtgttgaatcggaaatgatgcaacgtcgcgatgtgaccttcactgtcctgaaatttgccattcgggtaagttgttttctctatcgataacaatttgtactgacatatgcacctcagacacacctcttcttaccatatttccttcaatatggcctggcgagtgtcggaacgcccgcggctctcgctctctgtcgccatttttcacatttgtcttacttcgctcatggattggaaattctactccaccacgtgctagacgacgaagtggataatgagagccgagcgaataaaagtgacaatccccaagcacgagcagaaccactactcccaactgtcattgctttccttcaagcctcgcttcccgccagggattaccttgagattgttgtacaatgcacacgaaaaacggagcttcgctcatggcgcacactgttcacttacctgcctccacccaaggatctttttgaacaggctttgaaactcgactccctcaaaactgctgttggatacctccttgtgctgcaagccttcgaggatgaagagcatgggcatgatggccgcattgaagaatatgttgttcgtttgattgctctcgcctcccataagggagactgggagctgtgtgctgagctagcccgcttcctcattgcgctggatgcttcgggtgagatgctccggcgcgcaatttcccgagttggtctacgacccaactcgcagccttctgccaaaggcacatttcccaactcggcaccccgattcggtcccgcaggtgttcaaggtcttggcttgaacctcccaatgaggtcgccatcatgggcgtccctttctccaacatcgtctctttcgcctcttcccagccggcaagatggtgatgtgttagatgaagattgatattcagcgcatgggcaagatagataattaaggtgttgatagaacaatcagataataattgaacaacaatctcttggttgcttggtgacaaaagataagccattaccgagatgactcgagaccttgcaaattcgcgagagccacctcggttatgacaatatataccagactctttgaataggaaatatgatattcatttgatagaaagcactatcacgatgcaaggtgcttacagatatatcctataataatctcctgatgcctgccctggtaattttccttcctgtctgactttgaccaacagcacacaggttacaacccaggaactgctcgcctgcttcccgagtgagggcttttaaattcgttcgcatttgcctgaattgcatcttcttttctccgtagacatattgcaatctccattagaggaacaggagtcacctgggcatttatgttggcgtcgagttgatacatggccattcgtgtttgccactaggtaattgatatcaacaacttcgcacttgagactctccacttgaccgccgacataggcttttgggtgtttatccgatttagatgccttgaacatgtaagaatgggagcgatcgaaaacaaccaattcactttcgcatctttcaccactgactcgaataattaacatcaatcatagagaataaaactggatttataacctacccgtaaagtgtgcatatctttttcttgcctgatggcgcttcacaggggatatatacggacccgacgttgcgatgactagcagagattattagcccaggacaaggacaaccagtcatgcacgtactactctttgtcaagtttttgacatgtcccgtcaagatttaggtccatactgtgaccctggaagccctgggtcgtgtagacacggggcttcgggcaaatatcagtctggccaaaagccaccaacggatgaaacaccagagcaaaggctatgacactgcagactagcatgaccgaagataaaaattagagctccaggagataaatagagttgtgaaaagcatattggcaagtagaaatatacatcatgcctcaaggccgggtgtaagtccgggttgacgggggtcttgcgtaagggctactcctactaaaataacccgaagacagctctgaggttaattatcctagttgctgagctcattattctctattactattatatatagtaccaattttaagaagaaggatgtaacctgtacattaggcatcaattattgaccagaagagacaatcagaaaaacttcacttaacataatcaacccatttatgttgatgcaatagcaaacagaacttctactgcgatcagaaaggatttatcaaaatcgtagcactattagccaaatatatcaagccatcgaacggaggctctattcctaacacctccatgtcaaataattagctcgaaactacaagagttacctaataaagaactattcacagccacaaaaatttatgcagtggtgtcaagcagttagcatacggatagcctcgatatcaaatcgcaggtgtatctcgtactcacggccgatagtgtgaattctagcaatccgacgggtacctctctcccaagctccgagcacaacgcatgccgctgccttacctagctgtgtacctagaagctctcgatactcctcggtaccatactcccatgcgtgactctcaagacgatcacgcgtaggccaatccaaatcatgtctcgggtagaggatttcctgcacatagggcagggtctcttcattcacgatattagtaaaataaagatatttgagagtatcgatggggtggtcaaaactatattgagcgatagcgacattggaccaatgaggccccgtgtacctgtaaatacattcagcaattagagcgccttttgcgaagctatgttgatactgggtttcctttttgtcgccatccttgttatagccatagtggaacagtcgtgtgaagcggtattttttgtttgttattgggagtcctaggtttttcaagtcatccctgatggatttaggtgggtcatcaaaatggttcactggacatgtaaatctttctctcttattgctgttattgaacagatcgaacaatgtctgtctcgcttgcccacaatggcagccgcctagagttgggttggcaatccatgcttggtatgcagctcctttttcatggaacccacagacttcatcgtccgacagtgggggcttttcatcacctaaagggctattgaacgcaattggagtcattccattactcgatgtactgctatcatcgggaatgggatacaggagaggagatgctgaaggttctgcgattccttgcgaaagtactggggactccggggatttgggattcagacgccgccgagttggggagcgagaagaatcactgtcatcatcgtggctgcgcccccgtttgtgtagatttggcttatgtggtttagttggtctgcgtagccctgctggtcgatatgccattttacagtcccgcggtttgttttgtgttgtgcagaaaagatagacaattcgggtgccgttatattttgtagagatattatctcagatgaatacttgtaatgagcaaacgagaaacaatatgcttatatagtgctgatgagttggccttcataatatgttggatggggctattgaaagaagaaagaaacaagccctcgacagaaatagaacacccaagagctcacccaagtcatgaatataccaagacgtcagaagattgtatgtacaaagagagtagatacccgcgacaaagagcacaaaaataaattcacaaagagttcgaggcaaaacaaagcgaaacaaattgctttgttgggacaatactattctaagctataggctatattaacccccaagctatgggtgagatgcttgtaataataggtgcggtctatgattgacacaaaattattctgagagattaattttagaatagatgccctatagagcgagtgagatagatacaggttatgaagtgcagtgccggatgtggtaattgaccaacttgagcatcaagaacaagcgtccgaaacagctagttccaatagaaacaatcaaattatatcacaagacaagatggatatccttccagcctaactcttgagagatgcactcgtattcgcatattcggttgaaatactgcgacatatgttggcttaggtaaacctggaactgcttggaggttgctgtgtacaaaatcactgttgtccctgtagcaatcctgggcaatatccgatatcccacttccaccctccctctttgacaagatatctcgcccgtattcatatcttactgctagtaagatggaacatgcactgctcgcagtcctgtaaatatctcccggctacgtgtgcctccttcttgtcctgtgccagtcgccctgatgtcgctgaacccggccccgagctcacgcccgagccagcagccgccccacaccaacgctgcatcgagatgttctccgactcggctcattcgcgccaggtcgtcggtcaagataacagctcccattccatttgaattgttattgcacaacttgactgctttctcttctgtatcaaatggcaagacagtggccacaggcccaaagatttcctcctgtaccacgggactatcagtgcgcacgctgctcaagactttagggctgatctagaaaccatcctccgggacatcatcggggatcctgccaatctcaaacctggcatgttcttcaccagcctgtaccaagtgagatcgaatcttggaataatgctccccgaacacaatcggaccgagttccttgtccaacccgtagttactgtgaacatatcgggtaaacttgagcagaaacatcctgtaaatcgatttatggacgaaaattcgagagccgcctagacagagttgtccgctgttctcaaatgccgcgtaggctgccgcagagaccgcctcatcgacatcgacatcgccaaagactagtattggactactgcctcggatctcgagagacatgtgcttgtgaatgtcagccgccgtgtccttccgaatctgaattccggtttcgatcgccccacagaacgaaactccttttacaagcggcgagcctataagagtggaaccagtgtcggttccatttccgaaaacaatgttcataacaccgggtggtagctctgcttgccgaagaacttcgccgaacactatcttcagggttagtgcgttcatgtaagttcgtcaaataagataatctcttacaaaaggccgtcatgctagtcagttcgctcggcttagccacacctgtgcagccaaatgcgagacagggggcgattttggacgtcaagaggaaaagcggcatgtttgatgaagtgacaatggcgtagacccccactgggactcggtgctcgtgcgtgagagtcgaatctcctgtgcctttgttgagatgtaccacactttcgtcgtgaagaatgtattttgcaaaatatctaacaggaagaaaagttagagtcggtcatatacatcagacgagtggacggaccggaaatgctcaattgaacgatcaacttcagaccgagcccgaaagagagttttgccttggtcaatactctcccatactgtaaacatatctttcttttcctccagaatcgacgcaactcggagtagaagatcagaccgctcgtggggtgtggtctgtgaccatgctgggaaagctcgagacgcgacatttatagcgtagtcgacgacgtttgggggactgagaggcactttcagcaagagtttgcctgagcgaggggaaggtgaatctatccattccggtgtgtgtgcacaatcaaggaactggttttcgatgaaattctgaagctgaaggggctcattcgtggagttagtgaggtggtccgaagctcgcaccagggtatcgagctgccacaacgtagaaattgtgttcatgattgctataattgtagtgagagaggaattgaaggcagtcctatgcttgggatagtgaggctgagatcagggtaatgtgtgtgatacttcctggactcaaagataataccttgtgctgcggatgttgatgttattaggatgagacgcgtcgaggaagatgaccataatgattataacaagttcgcctgtttattacaccacttccacccactcagtgagagatccaaagattaaccaaaacatatatgagatgatacctcactatatggcttcttaattggctgatttgagtatatgaaaacatcttctataatattagaaactcggtagttctttcattctgctatcagaggcagaatgaatatcaaagcgtttagcagatcactgaagcttcaaaccaacatggtacatggtccccgaggtcttgcttcctaacacactgaaagggaaggcccgagaattaagccatattgcattgctcaacctcgcaaacttgtgtatggctgcatatagacgaagctgagtacatgcctgtgatctatacatgaaataacacgtgatgtggacccactttccccttcgggagtatatagggcacaggaggtatcacccctttcatcttttttttgattttcaccgatcaactccctcctgcttttgtcgtcttgtagagcagcagaacatattatgtacattaattataactaatactaaccaagtacatactaagtgttgatgatctgcaggcataaacgttatattcaggcatcaacatgtgagggcccaccttccattttcggaagcatctattcccatatatttcacagcaacaccttccccctaaccgagagtcccccagtggctgagtgggctcgcatgcatgtacttggtcaatccagctgcctgcgttcgacctgctcagtccacaatcctaaactttccaattatgcacccccaaccgtcttcttcccaccgcaggtccaggaaccagttctgccagcaggcaggaattgaggatcttggggtcgaacagattgtcagagagctttatgggccaccaaaattggtacattggttgggcagtggccaccactggctgggactctcattttttgggtgttttttttgttttccttcccctttctattttcctctcttgtcttgttagcgttttccacacaagataataggaacccccttgacccgaaggaatgattgcaaggcttcttggctactatgtagttgaaagataaattcactccatgtcagacaggtctgttaacccgtttccagccattcgagcattgtttctcaaatatagccgaggctctcaagctactattcatgcggccaagagcaagggtcatagacataggactgcctgctttgtcatagacaaagccaagagaattcacgtataattactcgggttgttcgattctttcactctttgagtctttgtcaatttattcaaacaaaaatgctgcacaatgccattaaccaggttctctttgttacttgtccgtattatttatgctcgcttcgagcatataagttcgctcgaggtaccctgttgtctaattggaccattggaccaattatatcccgcaatggcttttaagtatccccagtttgagccgtatggagacaagctaatccgatggatggaaaatgccaacgaacccgggtgcccagtttctatgactacacttaagtcacagaatcttccaaagtcgccggactggaacatcgagtacgaaagagaatggttatcaccagatcgtattgcctctattgtgggtcttggtctgcgagttggagagctaattccaaacgacttatatcccacagagtccccatgtctacggcattcaatcatcaaggcccgtcgtaatggaatcacagccttggtggggacaattgcaccaggagtactttttgtttattctattaggagataccacgagtcgaacgatccgtatatatcagatcttgccaagattgcctatggaacacatttttcgctggatagtttgaaatatatcttcatgaacgacgtgcaggaatctgcaactgaaccatttatcgaggaacagatctatccatgtcgtgcgggaataaagtatccatctgcagagagtcaaacctgggactatccttcgccggagtttagagctattatgggtacccctatcggtaaagttgtcggatacttcattctaggtgcgtttggtcaaggtgtaaaacgggttgcacgaattgtcacttttcagactggtcttgaccttcacaaattggaaattcgttttgatattgaagatgttcgaggaaatctttctttgggggaatttgatttagatataatatcataagagggagatagagtggggacactaatcaattttatattataggcgtatcagaatcttagattggggtagccctcaatcttctagcagtttattgtaggctaataacgatattggctaaaaggatatcaagtgataaccaatagtcaacacactgcatccattactccgcataggtgagggcgcagggccaagccactcacgggactcggcccgggccgcgttggccttttcggtatcaaagtggggatgtctgagaggagaccaagtcggagatgactggtctgtacggctgtggggccaaggaaggaggtttgtgggtgctaggactgaggtcaaacctagcttgtttgatggttcgttactagactttaattcattgaatggtctttccacatcatgaaaactaaatacatatgcagtgtcatgatcaatatatgctaagaccagttctaacgctcgttacttaattcgcagccccattctcccgttcctttaacgcttgacgaactttgggaatcacgaaccgtccataatcaatagcgtcgttgagattgtcatagcctcggatagagatgaggtcggcaccaagatcaacatagtcaagaagcgactcgacaatagtcttgggcgatccaaccagggcagtggatgcaccacgtgcattcgttgcagtaacagtaggataccaaagagcgcggtcctggacttctccgcgagcggcaatatcaagaagccgctgagagccggcgttctgtgggggcggcgcattggcggggaccttgccttgtcctttcgctcggttggtagtcagtgcatcgagggtttggtgtgctttcgcccaggcgaggtcgtcagtctcggcaagaataggacggaaggtcacccagatgcgaggtctgtctgagtccgggcgaccggcctttgctgcctctccatagatgcgatcaatctggtcctttgtttctttcaaaggttcaccccacagtccgaatatgtcagccagggagcctccaatacggtatgcttcgtccgatgaaccgccgactgagacaggaattgtgccgttagtcggccgaacgcggttgctgaattgtttgaaggtatagtatttgctctcccagtcaaatggctcatcggatttccatgcgcggcggagaatttgaatgtattcctcaaggcgtccgtaacgttcatccttagtcaggaagtctccttccttagcctgttctgcatcgctaccacctgcgataaagtgaacaacgacgcgaccggagctaagttggtccagtgtagctagcgcctttgccgcaactgtggggtaaagagtattgggtcgcagagcaatgatgaccttgatgtttttggtcaccgacagaatggtggctccaatggtgaatggatcataggatgaggagtcgtagggcaccagcgtgtagttgtaagcatagtcatcaaggttgcgagcgtagcgaacgagatattcaggatcaatcgaagcgttgggaattggatggatctcggtagatgcgttcgggaacgtgacgctgatgaattccggcatggtgactgcttttttctgccttttgacgttcttaattttcttgtcaggtactattttacttctcattcgtggtagaccgatcttcttttaatacttcgtagtatctccgagttgatttggcatcaacgcatgacgcaagatggtaagatattgcgtcttagcacgcaagtcgataaccatatcgttccacaccggatcagatgttttggattttcctaattcaagtaagcgttacttcttcggctgcattcagtgaggactagtacgaggaccagaaggtattgcgccagtattgcgcaagatcgaccatgggaatcgcaatatgaagttgactagcacccaggtaagcctatagaaaactagccgagatcgcagttcaatttccgctgacttctccagatcttcaatctcttgataacgagttgcagggatgtccatttatgacacattgatcactgagataatatgcgtcgtgatgtggtgccggtacagactcatgccaggctagcttctgcctttaacgctagttgccggcgggttaatctatatccagggcctccataaagtgcaaaggtcataacaaggttggtcgttctgctcaggttccttcggcagagcgtacaatatatatcccgagatctcagactctcggggttcatcccaaatgcaagcgagacgtgtcctttaaggagttatcgtggctatcacgcgcaatttctactccaaggcagtattctgtggttttttcctgtgagcctcagctgagtgcaaacaatcaatggctgaagttatagttggaccagcgctccggccaaagacccggcagcttggttaattcgagaccactcgcctgttgctctgattgagcttgcattcgatttccacgcaatagaggtcaggccatcggtatacctctccaagaccgtcatatgtgatataccctgtcagacttggttggagtgcgttgttgacgccttgggccggtccaccagcccaagtgggcaccccatccgccgtcagatcatgactcagcattcaggtccggtcgcacgtgccacattcaatgcgagtccctataggatctatcgaatacatagaggaagattggtttgaatcttgaaattcatccagcttgacatcattaccaggttcaaaccaataaggaaagcgacaacctgttgagaggcgcgtgatgataagacgctagtctaaatcgggatactacgtcatcgatgagggatgggttatatccgcgacatacctcactccatcgtgtttcgtttacacatgtttcccatttgaacaaatctactacattgaaccatccaccatgccactcgttgtcccaggaatcaacagctcatttggcgataagtccgagtgggtcaacaagctgatgggcaagacgatcagcgacactactaatgagacagtacgtcacctttgagaaatcatcgaaatcaaatatgacattctaaccgttccatagtcttttgcaaagaaggatcttcctgaatctcaccgggtgttgaagccaggtgacgcgaagaccatggatcacaatccaaacaggtaaagcctcattgcaaagtgccgtgaagccaatgaccatgttgctgacggtgtacgattgaacatagacttaacatccttgttgatgatgctggagaggtgcatgatgtgaactacggttagagctaagatatatttactaagcctggtggctcaaatcacaagaacaaattgagccaattgaatatctattacttgaaagtctattgatgtcctcaaattagcatcttgtatgggctaactcactcggccttccatctgagtagagtaagggagtgtcgcgggaacacatattgtccacttccagtccaggtcgactcttggatcgccacttcttctttgccgttcagatttgtcacggacagatcgcccgcggtgaccgtgaacacagctacttctccctgggctccctcaacatgactttccaagtctcgggagtcgtgaatattcaccacagcaacattaacaaacccatcatctcctacagtggcacttacatctaaccacggcgtatccttggcacttcgaatccacttgggcgatgtctcaccctcgtatgttccacaggaaacatgactggccacggtccaaccacgcatatatcgtgaaaacagccaaagcggccaccaggtggtctgcttggtaattccctctggggtagtcatcaagggcgagatgacattcacggtctgcgcgatacacgccatgctaacatccttgctctttcggacaaagacattcaaccagacggccacggcgagcgcatcggagagcgtgtaattctcttcggcacctaggctcccctctgcgcggattggatcccacacgttccactcgtcgaagcagatcgtcgggcggagttgctcgggaggaactttgtttacaaccctggcaaggtcaatcaaagcggacgtaatttcaattgcgcgctcggcggcgagtggcgctgtcacgttgaggaggtgggatgatgaagacgtgtagagatggatgctgtgcatgtcaatcaaagggactgagctggttgacaatgcggagtgggcaggtacaagacactgatttagtgtgtagtaatcccacgaagcagtgccatcttggccgcagaggatcaatatcagggtgggatccaggagtttgagagctgtaagaaaatcatattagcgcgattgttctggtagtattgaaacgaagcattacctttagcccattggattgccttgtgagcatacgcttccttggtcatctgctcgacctgccaaggaccccaacactcgtttccgagggcccagtacttgacctgttcagggtgttagatcgttgcagctgaaaattttgcacttattacatacattgtagggctcctcacgaccgttctttcttcgtagattggcatagtaagtattgcccgttccattgcagtactcaacccaacccaaggctaatattgtccaacatcagcatgttgtatcaaagtcttaaataagaacgtaccctcatccaaggtaccggtaccaaagttgaagcaaaggtacggctccgtgcccagagcttcacaccattgcatgaactcgtcagtaccaaattggttcgtctcggtcccgagccaagcaagttctggtctttcgacagatcgacatcagcaaagttccaccaaagttaatgtgatatgagaacataccttgctggccgttggttcttaggaccaataccatcgagccagtgataggtcgcacaaaagttgccaccaggatatcgaacgacagggatgttgagccccttcaacgcctccaggacgtctttgcggaatcctttctcatctgacagtgggtttccagggtcatagattccaccgtagatacaccggcccatatgcctaagaactagtcagtttatgtcatgagactggaagaagttcaagatgccttactcggtaaagccggcgtaaatgtttgggttgatcttggagatgcgtctcgatgggtgcacagagataagaggcgtctcatgatcatccaatttggtaaaggtcgtcattgtttgcacaaatgattttgtttctactgtttgggttgaggcgtcacttctggctaaatatgcgatttagcttggatccaaggtcgcggttcactttagggaaaaggtatttgaaaggcacgattcaaggtagacaagtaagaagcagatgtatactgatcgcagataacctatcgaaataaccgagggttcaggccttgaagcggcaaaactcctgcgggggaactgtcgtgagatccggatgatgacccctgtattagccctagtagccctagcagcgtctggggtggctaccggaaacacgagacgaagcccttagttagctttctggatcaatgatagatcaacagaccaatgagtcgcagtctagctttaaaatgcccccggcatgagaggaaggtaggagatattccatcaatcacagacgagatcacgcgccacatttatttgccaattcctccccgcatgcttgcaactcgtcattccggaccatttctagcaaaggacaaaatatgagaagtgattggtgaagcagtttccgcattccccatgtttacaccacgcgatgttagcccagttcaagcctcgacttccccgagtatacgattctccgaagtcatggctaattgcatgggtttctctgtatatgtagagaagattccccggagaatttgtggcatgtggaggtagatcttcattccccatattcttcgatataatatccactctctaaaccatgcgtctctcgccgtcgtggtaccaggtatgaagggaccactgcattgagaagacggagctcatgctttgatatagttcctggtcggtgtctttgcctctcttggatcattcctttatggatgtatgtcaccaattccctacgtgacacgcggaatctaataaattcgcagatgatctgggtgtaatcgctgaggtgctcgtctgccaatcatttaaagccaaattcgaggcagatgatacccaaacgtcagtcccataacatatggaatatgggaatatctaacgactttgcagaggattagtcgtgtctttattcacggctggcgcatgcatcggtgccggacttgcgggcgccagtggtgatcatttaggtagacgacggaccatctcattgggatgtttcatcttcactctcggaggtggtcttcagaccggtgcgaggacaattgcctatctatacagcggacgattcctggccgggttagggtatgtgatttctctcaaaacagataccccaataagcactaatcagattaattcttagtgtcggtttcctcacaatgatgattcctctataccaagccgagatctgtcaccccagcatccgtggtcgagttacggccttgcagcaatttatgctcggtattggagcgctctgcgctacatggattggttatggaacatacaccggctttgcagaggataacaatgcgcaatggcaactgcctctcggtttgcaaattgcccctgctgtatttttgggtcttttgatctctttcttccctgaggtagggtctgatttccatcgggtgaactccaataactgatgtttatccagtcgcctcgatggcttattgaccacaaccgcaccgaagagggattgcgcacattggccaagttgcatgcgcatggtaacgaaaacgatgcttgggtccaggcagaattcgctcaaattcaggagagcatcacgtttgagcatgagaacgaggcgaagtcatatgtcgagttgttgaccaatcgctcctcgttccgtcggttgttcctctgctgtgcattgcaagcctcagtccagatgaccggtgtatccgccattcagtaagtgtacaatgacttaccactgccaagatatgtcagcatagaatcaatcagctaatatgatttcgtgcatagatactactcacctcagatttatggtcaaatcggtatctccaacgaagacaccctgaagtatcaggcaattaactctatcatcgcgttggtcggccagttcctgtgcatgatgttcattgatcgcttcggccgtcgctggactctgatcagcggcaatctcggcaacatggtgaccttcatcgttgcaaccatcctactcgcaaagttccctccatcgaccaacaacaacggtgcgcattggggtttcatcatcatgacttggctgtacaatttctccttctccgcaacctgtggtcctctgtcctggattatcccagccgaagtgttcgacactcgcacacgtgccaagggtgtctcgattgctaccatgctttcgtttgctttcaacacgatgatcggccaggtcacgcccattgcaatgacgaacattggctatcgttactatttcgtatttgtcatctgcaacttcaccaatgcgctcttcttctggcttttgcttccagagactaagcgcgttcctctcgaggaaatgaaccagatgttcacgaatgcgccatggatcgtgcccggaagtcgcaaagaagattatatgactcatgacctggagcggaaggttgaggagcaggaagtgaagcataatgcgttgcatgttgactagaataggaacaaggggaaggactgtaggggacatcgttggggttgcatgtgtggagagctcagttgtgatattgagatacaataatgaagttgttacccgtggagaaaaatgttcgtaaaatcgatcggccttgtaatatgtaagagaaggcactaaaatagatgacttgagaaggtcaacaaattggatatgagagatgatctatagatactaatgagaggccaagccatgccctcttattatacctgtagagacattgcttattcaatcattaatttgatctacatcatacaatgctaagatagattttgtgctaactcgaggtcattcatggatgttgttccatcattcagaatctgagctgtatcctgccaagccaagcgaaactgggactggttttgtcgggattttggactttatttgcccctcctctgtgtctgttaccaccttgggctgtgtggcagtatttgtggtttcgggtgatgtggcagaagcagcaggtgtggcttgatcggacttggaagtcccttgatccagcttcttggtacttgaaataccagatccaggctgtttctgcgagtctttcccattctgtgtgtccttctcagcagtaatctcggtgactgaagctttacgcttcttccctgcaatcaatgagttcttgtgtttatcgctccgtctcttgcgagccagtgcggtccattcttctccttgtatgggtgcctccgacgaggttgattcaagcaatgctttctgcgccttctcgcgctgtcggcggaaggattcaagttgttccgctgtctccctcttcacagcagcctcctgggcacgtgttgactcgagaacagaatccaggaagtcgacttcatcttcatccagggatcgaaactggtttttgagacgcgatttctcttcaaaggcttcttgtttggccactgtatgataaccgaggaaaatcaccctaacatgttagccagattcccggatgaattgtccactactcttctttgttcgcgcagacgggggccaggtatccgagttgggctcacttttattgcgctccagcacctcgaagagacttttgccctcatcctgcttccctatttcggccttccgtctccgctcctcctctagctcctgctgcactctaagccactcatcgtcccgctcgatcggcttctcatttgttccggatgaaacgaaacccgatgacatagtgatcgggctgggtaaatgggtcgttatggatcacgggatggagcactgggaatggtcggtcggaatgcgaaattatccggcgacgggggtaccgatatgggacgtggggtggaccgaaacacgggatgaaaataaaagagattcgagaagttcctagaaagttgaggtttcaggtaattgtgagacccggacagttcggagaattgcaagaattggaggggtggatcttaattggaagatgtggaccaatatgagttgcatttagccagaatgctgtctcttgccctgtcacggtggaactggatatagccagtcgggtaattcgtgatcacttcatccaaggacacccaatttgttgcgaatacgacagaaatcaagagagataacgtccaatatccttcgatctaaacccccactcccccctctctcatctcccccacgacatcatcgcttgctcttggacctgcccactttaaatctgcttaccatataaagccaaggtgcctcttgatagtctttttttaaaaaattcattcttgcggctttcaaaatacagcaaaatgtcgaaccaacacaccgagtgagtgccttacaatgcaatgcaatacgcctcccctccctagccattgcattaacgcttacctctctcttcaggaagacctataccctcaacactggcgccaagatccccgccatcggcctgggaacatggcagtccaagcctaatgaggtccgcgaggccgtgaagaacgcccttctcgccggttaccgccacattgacactgctctggcttacggcaacgaggctgaggtcggtgcgggtattaaggactccggcgtgccccgcgaccagatctggctcactaccaagctagacaacccctggcacaagcgcgtcactgagggcattgattcctctctcaaggaccttggcaccgattacgttgacctctacttgattcactggcccagctccaccgaccccgaagacctgtctaagcatctgcctgactgggacttcatcaagacctggtaagtgacaccaagcatccacttccaaggttagtggggaaccattgctgactcctcatgtctaccacaggcaagaaatgcagaagctgcccgccactggcaaggtccgcaacatcggtgtctctaactttggcatcaagaacatggagaagctcctgaatgaccccagctgtaagatcgtgcctgccgtcaaccagatcgagctgcaccccaacaacccatcccctaagctggtcgcctacaacacctctaagggtatccactccacgggttactcctgcctgggctcaaccaactctcccctgtacaaggatcccactctcctgcagattgcggagaagaagggcaagactcctcagcaggtacttctagtttggggtatccagaagggctggagtgtcattcccaagtccgtcagcaagtctcgtattgagggcaactttgacatcaatggttgggacttgactgccgatgaggtgagccaactcgataacctgaaggaccgcttcaaggtctgtggtgacgattggctccccgtcaaggtattctttggcgatgacgagtaaatatgtctaaaattatgaatgttttatgagtacataggctttagataccaaaagagtcttattgacacccaaaagctcaatattattggtgaaacttgcgagatttcagaatccactgcgatgtcgtcatagtaccaaacataacataccaagcaaactaggcaaacatagtcattttggtcacgccggtggcggggcacagccactgcggagcctcgggtctgaggcggagagataagggtgtatacccgtggaccccggcgtcatcaggcatccctcctgtcttctcagcatccattcccaccatctccatcaaactattcatcgctgagacatcaccatggcaccttcagcagggcacctgctgcttcctaaattttggagggcagcacggtatgtctccccttttctgtcgccatagcgagttacaatggatccattgactgacatcctcctaggttcgcctacgaaaaggcctccaaggctatacgtaacaaactgccagagcctacacagtattatccggtgcggtatcaacccgcctatgcccgaatcaaccctcgtcagccaatcagccgtgccgctgccattcgtcaagcccgtagtcgccacttctcgacccgtgctggtgccttcaccgctgcgattcgatccggactagggggcaataatgccgccccccggaacacctctcgcattgtgtctaatatcagccgactcagcagccgtgcacctttcgcttctacccttcgtcccaatctgaccggcggcacccttggccggactgcaggaggatacgctgctggagctggccgttttggtggagctagatacttttcccatggccctgctgccccagcacaagttattcagaatgtgtctcagggcgtccgtgctttctttctttctgggcagaaagttcgcttcgacggcatcgatccacgcaccggagagaagcggtataagtcagtcagcgcgctacaggatcaggcggaaagaaagatgaatgccaacctgcacaacgcacctggctcgtacattgacttccaagtttccccgaccatcactgcactcagtgccgttggtgctctcggtaaccaggaacgctcctcgtgcgactctctgaactccgagggcctgatggatctgctctctgccgattttgcccgtgctttgaaggatttctccgcggtaatgaacgacctgaagcgtctctcgtcacttggtgatctcccgatctcccttcacgaccgatcgactatacgggtgcgcttcccaggctgtgatgcagaaactgtagagcagctgtgttgcgaggtcgggattcagcgaggccgagtcgtgcaggatgaagatttcgatattcgcactggcgctgatttggctctcttgttcccttttgcaccgagcattgcctcttcgtccgacactgactattacttcgagaaagccccaaagttgcaatcgcagtatccaccggaccttgactggcaagggatgatgacaccagaaagctgcacgccatcgtcaccaagtggcagccgtgattcgggcaatgctatcagtttcgaggacagtgagctatttggtgctaatccatggatatcttcgaccaagagctactctagtattaacatcagtgagcttggagatcagcatttcttcccggaaatctccagctctggtcaacccgacagtaactctgcatatgaaggtattgagggaatttacacgttcctagctgagtgcgatcaagccaagcgttgacgaacacactcatattgggccatacttttctactattaatgttttttatctctcggggttttttccttttcctttttttttctttggtacatatctcaggctgagaccgggactatatacatgacgacgcagataccactccactctttaacacacttctttcagtgttacacttgctcaattgaatgaatcagattgaaacttgcttgttcgctttatgtcactggtggcctagtacatcgaggaccggtcagctatagaagcgattgatttctctcaatcctctttggcttttcaaaatagccctagaaatagccactcatgtcatttcagcctgcacaccttcgtccggcctcttggaccattacggcctaaatgattgtttcatataaagacaggccggctgaagaatgcgccacggtgcggggtccgggggatgtgaataatgtggcttgccgaaaggaaatggcgttttttcttggcttggacttttcattatgtcgatatgtcaggtctctggagtaatccgtattctattgcaatggattctcgaaattcttcctcctttgcctgggcgaaatcagcttgttttgacacccttcctgcttctgtttgtgattttgtcttagggaaggatccttatgcgctatgttagcagtcgatcacagacgagcagcttaaccttacaactggcgcaagcctaatatggtcctcccgcgccgagtctggggaggatcgacgatgagtgtctcgtttggggacgggggatcaattccgcgctgatgccgggagtttgatattacatcaaccttcctctccttgactatctaggcaattaatattagtttcaaggctacggactatttagtgcgatatgagctatgtgccatcgaacccggatgacacaggtttagccagatttaaccacgtgttagggcagaaattgcttgtatgccttctctgttatacatgtgtgtcttggcaatgtctggaaatggattgaacggagatagttctgatctcttatagaatagcttgatacaatgtagcgttggcttcgggtttccggtttcaatcccggcaaggccaacaaggcaatcttgctggggtatataaatttatcgaattctcccacaactgttaacaagatcacaggaaaacgagcaaaactcgaattcattgtttcaagatcatcaatatgcaatttcttcttcttccattcgtacctctgctggcttcttccgcagcggcagctgcaatatccagcgcagctagtccagctgtcaccgctgcagcttctggaaatcccttctcagggtaccagccttatgccaattcgtattatgcatcagaagtctcatcctcagccttgccatcaatgacgggggctgccaaagccgccgcaagtgcagccgctcaagttccgtcctttttctggctgtgagttcattgcactggtattatatatccctcgggcaaatactcagattgccttatagggatactgcagacaaggtaccaacaatgggcgagttcttggccgacatcagggccaaaaacaacgccggtgctagcccaccgattgctggccaattcgtcgtttacgacctgcctgatcgtgactgcgcagcattggctagcaatggagagtactctatcgcgaacggtggtgttgcgaattacaaggcgtacattgactctatccgcaatgtgttggtcgaatactctgatatccagactatccttgtcattggtgagtataccttgctgattgatggcttcccgcacggcaatagtgattgctgatattttttctagagcctgatggtctggctaatttggttaccaacatggctgtgtcgaagtgtgccaacgcacatgacgcatacttggagtgcaccaattatgccgtcacacaattgaacttggccaatgttgccatgtatcttgacgctggtaagcatctttcctcggtcctggaaggcgacaatccccttgcgacaagtaaaacagcgagaattatctttatttctgtttagccaaccgctcagttatgtcattttatgtggcgtcatgagaataatgcagccatctctcatctgtatatgcttactattaacataggacacgcgggatggcttggctggcctgctaatctgagcccagcagctgagctcttcgccaacgtctacaacactgccaataaacctgcagctctgcgcggacttgccaccaacgttgccaattacaatgcctggtctctctctacatgcccatcatacacctctggcgatgccaactgcgatgaaaagaaatacgtcaatgcccttgcgcccctgcttaagaatggaggttgggaagcccacttcatcactgacaccggtatgtaatcaagaaactttaaaacagcatcagatcaatcaccttcttctatgggtcaaagatctcacgctgaatgttttggtacaggccgcaatggagtccagcccacccagcaaaatgcatggggtgattggtgcaatgtcaagggaaccggattcggtgttcgaccaaccacggagacaggtgatgccttgaccgatgcctttgtttgggtgaagcccggtggtgagagcgatggtacttcggattccagctcggctcgctatgatgcccactgtgggtatagcgatgctcttcagcctgctcctgaagctggcacgtggttccaggtaagagtgccccgattgaaagtgattatttctacaacactgacgacttcgcaggcatacttcgcccagcttgtagagaatgctaacccgtctctttaagtctttggaatcggcaaatataggttccagggctagcagctacccaggcagcgaatgctgtgctttgtgctgattctctgtgttcccatttgatagtacctctgccgggaggcttagaccaataagcagatgaccaaatgctcataagattctggatgatctcgaggctattcccaagatctattgtttgccagcatgtggagtagatgactatatattcgactatccattcattgatgaagatgccatttatagacaacgtcgataccgccttcacagttaggtgtgcacgtgcacgggtagatcaattgccaaaaggcggtctgaatatcaagcagtatcctgaccgcccggtaggcgaagagcatcgataacgaattgcgggatatcttgtccactaccacttccacaacttcaacttgcgccaatcctttgacagagcctcttgttgttcttgatatcatcagtgaatataagcccatctgcattcctcagctgtgcagctttgggtgcttcagtgccccgggcgtaatcaccccacaccaacactctgagagacaaagagcgagagtgcacaccctgtcatggaggacttcaatagtgaaactgatagtgattacaccagctattggcgagactgggtaagtgaatttcttttcatcgcaatctgatttcccttgagaagtgaggcgttacggctggcgacagggccaccgtgggttggaatcgaatggagcacagcgaggggctgccgtgacccggacaaatatcgagcttcgtagcgtgttgctgcgacgattgtgacttgacgatatcgtgtctgtcgtcctggcgatatgaatacagcctgccgcgacacaaataccatgttctcctctccaatctcttctccttctcacatttgcatcctgttcggctcttatttttgctttactggatttccacttcatcatggtgtcttggctgtctccacaagttgtccttttcttcgtggtcttcttgggcggcgcagcatctgcgctgttccaacgcgcgtcttggtacgcggaccatggcgatatggattcttgtttcttgtgtgtatcgttcgcgatcacttcggtctacttttacgtccatttgctctgcatttacgtccagatatcattggaagttgatctagccaggtttgatccaaatgaccccaatggtccccgcggctctcctggctcggattttaaccccggtggacaaaataaaccacccagtggccagtcaccccaaccttcacggcgtggccctgcgcgtggagggtcttccacgtcctcgcgtttctccgattcccctctgtctagttacagaagccgtgcagtcttattcatgattatgctaatcgcaatcatgtatttgcagtttgtctcatcccgtggtaacgaatacttctgcgagattgacgaggactacctaaccgatcggttcaacctcaccggtttgaacaccgaagttccgtactatcagtacgcccttgatcttgtgaccgacgttttcgatcttgatgccgacgacgatctgcgtgagcaaattgaaaagtctgcccgtcacctctatggcttggttcatgcccggtacattgttaccactcgtggtcttgccaaaatggtatgttgaaattcggaacttgtgtgcatgttgtttcccagacgaaagtactaacctccgtgcagcttgaaaagtacaagaagagcgacttcggaaagtgcccacgcgtgatgtgtgatgggcatgctttgcttcctcttggcgagtccgatcttccgaatgccagcaccgtcaagctgtactgccccaagtgcgaagacatctacaacccgaagtcgtcacgtcactcgtccatcgatggtgcgtacttcggtacctcgttccactccattcttttccaggtctatccggccctcaatcccgagaagagcagccgtcgttatgaaccccggatctacggcttcaaggtgcacgccgcagctgcacttgctcgataccaagacaaccagcgtgaggatctcaagtggcgtctcgccgaggtcgatatcaaccacaggttcatcgaggatagcgagagtgatgacgatgcattcgagtacgacgaagattatgttgaaggccacgtggagcaagtcaagaacgacaagctcttcggtgatgcagcttcgctcgcatgaatgtcgccaagtactcttgagtgacatggattccattcccatatttcacgggcaacatttcggcgcaacgagggatacgtggtatgcttgtgcttttcttcgggtgttttcacgaatgacggcgttcggtagatcgcaaggataatttgcgatggttttttttttctccgacttcgtttgtacctatcacctatctagtccattcgggactcaattgaaaccacatgactcaattgaaaccacataacttttatcagatctcttgcaatggagatggttgctaggtttatatggccgggatactaagagataataagtacacgtatattattccgggtactatttgcagccgccgcttagaatgttgaacgattgggtacttcctcagaactacagagccagtcccatttcatgcaattgttcgaatgcaaacgtcaccgcgcgagccagttgctcgccgttctcccatgcctcatcatgagcaccggtgatcgataagatgcgaacccgtctatcacaatttgaagcttcctgcacgggtatctgtgcctctgccttctcccagttcctcaaggtcttctccatgacctctatctgaggcgcgtccaccaacccatcgtccttagaatacgccaggacaaccaaccttccagaattccacccgccttccactccccgagagccagtcaccttcgccggcgatacttcatcccagagcatctcatccgccccaaaggccccctcaataaactcctggtatgccgagatgtcagcatgcgtatcccgcagcagtcgcaggtcgtagatacccgccacactgacgatggcagtgggttgcactggtgctgtagttggcagggaaccggaagggccaggtatagcgacggtctgttcccgatgaccagaaaccgtgcccatcacagcttggaaggccagcgttgcgccgcaactgtggccaaccaggatgtatcgcgtaccgaacccgtatgtattctggaggaatgagagcgctgcctctacatcggtgatgtggtcagggtgtttcgcattctggaaatccttcggggcggtatttgagtcttgtgggtgatttgggtgagcgctgagtcggtacgagatcgaggcgaatccggcaatgggtagatctctttcgcgaagtatagattccgctgcactgaaagaggttgatgtaaccgctggatcccgccaggcaccaccgtggatgaagctatagaagtacaccaaacgttagtattgctttcggataggactgtgatggggacccgtgtacatcacccagtagccatctttgcgtggagctaatgttgtgacggcaatactttgtagattatggtcttggccatagacaatagtctgtgtttttgagtgatccgacatgttgccttgcggagttctacaacatctcttgatttatggggaagtgggacatgtcgatagattacgggcaggctaggagctgttgccatttgactgacatgttggaggtaaaaattagcttcgtcttccaatatccgtcacaatgtcctttaagtcactttgttcgttcttcttcccgtctcatgtattgtttaagacctctggtcgaatgagaattccccgatgagtccatggtggtgtaatattactgtattgcccctccatctacttagtggaaatctgtaacatatttcgttgtgtattggtatcacgctaagcccaatcaggaattaatggtccctttcacacaaaccctccaagtccaccgtctcgaccttaacaaccgcccaactgttgcaatctttcacaatggccgagtgagtgatggtcttttttgatcagcaagaacatgatgctgaccgacttgcagaattccagtccccctcgcggccgttcaggtcgaggccttggtatggtctccccgacgaaaatctcccccagtcctcgccagccagaaatactgacgtcgggtattccaggtggtgatgaaaatcatcaagcactgctcccagaccttcccctccactgcaaccggcgcaatcgtcggtatggatgtcgatggcaccctcgagatcaccaacactttcccattccccgtcgtcgaagttcccgccgagtcgcactttgacaacgccgctcccaaccccgccgctgccgctcctcgtgctaaggcaaacgccgcgtactccgcagagatgattcgcatgctgcgcgaggtcaacactgatgccaacagcgtcggatggtacaccagcgccaacatgggcaacttcgtcaacatgaacgtgatcgagaaccaattttactaccagagccagctgaatgagcgcacagtcgcactggttcacgatgtcagccgcagcgcccagggcagcctcagcctccgtgccttccgcctgtcgtccaagttcatgactgcgttcaaggagaacaagttcacctccgaggagtacgtgcaatgacctagtcgatttataagattatatgagcgacatgaatattgacagaattgcagcctccaaaagtccaacttgcgccaccccgacatcttcgaggaactgcccgtcaagctccacaactcccacctgatcactgctttcattcaccagttgcagtgcccgatttccacagcttccactgagctcccttcctccctggctgcccttgagtccagccccttcagcaaaaactccacccttacccccaacctcgacaacctgtccctcagcatcgatcccttcctggagaagaactgcgatctcctcctggacagcatcgagacccacaacaccgaggtcaacaactaccaatactaccagcgtgtgctcggccgcgagcagcaaaagatcaacgcctggaaggcgaagcgcgcacaagagaatgccagccgtgccactctcaaccagcccctcctccccgaggacgagtggcaacgtctgttcaagctccccgccgaacccagccgtctggagagcatgctcaacacccgccaggtggaacagtacgcgcgccaggtcgacagcttcgtctcgtccagcacgggcaagatgtttgccatcaagggcaacctgctgcccaacgaaacctcgaactaaacgttgatgattgcgaaggggagacacgacgcttctggtattgcatgacctttttacggcgtagggagggaaaatgttctctattttggatgttaatatgacttcctgtttcttttttcttctatgagcggagctgagtctctgggaattatactcctgctttgtatcgacttgtattcgatcatagaaggaaatcttattttgtttagaatataacaaacacattgaacaggtcaatttctcatgtaccttttttttatttcaaaaatagcataatctgtggatggaacaaagtgatctaagacaaatataaggttagattaatctatgaaatcgtatatctatgaatactcacatgcatgcatgcatcataactaccatgtgtctggatgactccagggattttgaatttccaagggaactgcagcctcaagctcgtcggcgactctgagtacacagacgggactaatatttcccaacagggtggcaatcgcagtgtagaaaataggctgaagagcacaacaagtccgatggaagagagtgtcaccaacaatatccgaagcctcgatgcagccaggcgtcatcagagaaagctctctaagcttctcagccacctgaaagcgaagaccgggcttagatcgaagctgcatgatctgggcatgtaaaaggtcgaggaagtagctccggtccttacagtagatactgtcgggagcagggatatccatggtgaagggtcgatgggagtgatagagggggagtatggatatgtgggatccgtgaagattgtgttggagacactgttgcttggtgacagaatttcgaggtgggatggaagctatttatacagttcgaatagttgacttcaaatactcgatgaagcacagctcgaaagatgagaacaatatgaatgtaaaagatcctttgtttacatcttctcttagttctcggatcaacttgcacacgaaggccattgtactcaagaagggactagacaaagcaaaaagacattggcttttacaaatatgaagaatactaggcattgagtaatttattctcatcaggaatcataatatacagaggcttgtcatatagttgagcaaggctattgacacttcgaaggatgacatgatgttacttgatttgatgttacttaatatactatgtacacatgtgaaaatacaacggcctggtacctttccatccctgactagcgatgtgtcgattaatatttattctgttcctttcgccgatcgtatgtctcgactaccatgcttccccagtgagcttcaatggaaggtgaagcaaccgataaccgaaattcgttggcgaaggaagtcgtcccgctcgaatgttaatctgcaaagattggtgaagcagcctgggtgctgccagtcctgcatcacgttcctttcgcaaagtcacaaactcttcttcgctgataccatctttcagatgtttattcagcttcttgtgatcctgtacactcacccaaggaacggggtcactgcgtccctctggtggataatcatgacctgtccagatcttgaagtggtcagggaggcttagaagcttgcggcccgaacgaaagaggtcgttggcatcgccgccggggaagtcacagcgtgcagtgccgatgtccacatggaaaagagaatcaccgcagaatagattatctggtaaatcttgttagtaattgtttaacgaggtcattattgttggttgataatcacctccaaccatgtaaccaagatgatccggtgtgtggccaggtaaatgaatagcctttcctctcaggttcccaatagtgaaggtctcatcgtcgtcgaaaagtacgtcaaaaatgccttcatattccactggtggaacgccatatctttcggcaaacaatctttgtactttttcaatacgcttaccaatgcaaatgggcggcttaagattttgatcctgggcaagacgtttttgaaggtaagatgatgcagtcaaatgatccgcatgagcgtgcgtttcgagaatcttatcgatcgtatagccctttcccttgataagagaaagcagggaatcggctgcgtgagtagtcacggcctgagtagcagggtcatagttcaggactgggtcgatgatgacggctgttgatgttgagggatcggcgatgagatactgccatgttccagatgtgggttcaaagacatcatgaatcacaggctcggtatatatagtggatgcagtgctgtatgtgacttggcgtgggattagatgtttggtcggggtagagaaggaacgaggcgagaatgggcggttccagctatgaaccgtctgccctttttgtgattgacgcactgtccccttgattgaagcgacgtttctcgaagattttgcggtatgagatacacttgtccgtgtcgctttttggatatgacgcaattgtctcaagttggccagcattgaagttccaattggcctgctagacaatctgaaaaggtctgacgaccattgccagccgatgcttgatgattgctgcttgaagcttatcatgatattccggatttgaagaacaaaatgtggtgaggaatgtcagagctgtcgcggtggtcatacttgaaaggcgtgggtcggcgactcggcgagcatatgggtcgccgattgaaagagtcatcacaactccatgttcaaggtttcttgcacggactatcgaattcgaggaacatatgatgttgttagcgaagtagattgatttaaatactgttgctaacgcttcaatcccatatgttaaggcgaatcaaagtctataagaatcgaatccgtatgcacgaccgcagtcataaagtgagagatagagagatactgagacacttcagagtccaagaaggacattgaaacatatctgaagtaaacaaacatcattgtaactactccgtaactacggagtactttctttcacctatgggaaccccgaaagtattcggcgaagaaaggccgaaactccccgatatcggaacgagttaatccgaaaatcacgacatcataagatcagctgttttaactacttcagggctttttttttgtcacattttgagccttacattccaagatgtttcagcgtcgcacagtgcttgctgccaagcgctctgtcgctcaatggaggagtctcgcaaccgcgtctcccgtgagctctgcgcgaaaccacaaaattgtagtggtcggcggtggttctgctggtctcaccatcagtcaccagctgctgcactctggcaaatttgcacaagatgatattgctgtgattgatccagccacatggcacaactaccaacccggctggacactggttggcggtggcctcaaggacaaagaggagctacgtaagccattgaaaagcttgattgatcctaagttcaagttttataacaatggtgttggctcctttgcccccgctgaaaactcgctcactctcgagaatggtgacaagatcaactacgagcaactggttgtggtgcccggtattagcatcaactatggtgctatcaagggtctccctgaggctcttgcagaccggaactcaaccgtttccacaatctacagctacgacacatgcgacaaggttttccgcaccatcgaaaacttccgcgaaggcaatgctatcttcactcagccagccggtgtgatcaagtgtgcgggcgctccgcagaagatcatgtggcttgctttggaccactggaaacgagctggcctctacaaccctaccagcccctctgaatcacccatcaagatcagctttgccaccggcctacccgtgatgttcggtgtgcccaagtacagcgccgtcctcgagcagatgcggaaggaccgtggtgttgagggattgttccagcacgatctcgttgccattgatggcaagtctgccgtttttgcttctcctgagggagaggtcaccagaccattcgacctgttgcacgtttcccccaaaatgggtgcttacgccttcgtcaagaacagccctctggccaacgaggccggatatgtcgacgtggacgataacaccacccgccacaagaaattccccaatgtctggtctgctggtgatgcttccagtttgcctacatccaagaccgcggcagcagtcacttctgaagcccctgttctcgttcgcaaccttttgcaaagcatggagggcaaggaactcgatgcttcttacgatggatacacctcgtgcccgctcttgactgagtatggcaaggtccttctcgctgagttcaagtacggtggagtacccaaggagacattcggaaactggtttggtatcgaccaggctgagccccgtcgttcgttctggtatctgaagaaggacttcttcccttgggtgtacttcaactacatggtcaagggtaactggggtggaccgaagggctggctataggccgtgtacattatccctatgttgcaatacgatggcagtacctcggggttttttaatcattaggggttgtacaaaagaaaaatgaaatcattgagcaaaatatctcgacagtcctaagtgcgttcagtctaatacaaagttaacttgggtggatatgcacgtgaccatatcaccaatgacatcatagctcatcataggtcgttatcgataactcgttatcgatcagcgagtgaatctttagtggaattcttgtcttgaattacattcttctctttcgaaatttaagtcttcgacatgtctctaggatagaaatctgacctctgttgctctgcatctctccatgtacaacactcattccgatatttgggtcgtgagtctcacccgatcaaagcatctccagtatactttcctattctcaccactaactggtcatattcctcaataggcaggcgcatttgccgcactcatagtcgattttatcgcctaccccttcgacacactcaagacccgtgtccaatccccagactatgagaaggtcttcaagaatgcgcgcacaggagcagtgcggcgcaatgtactcttccgaggattataccaaggtgtttggagtgtggtcttcacaacaattccagcttgtatgtgttggctcttgttgatgaacagggaactaggaatatcaccactaacgatcctatcaacgacaatctagctggcgcattctttaccacatacgaagctgtgaagagcattatgtacaattcctcaaaagaagcatccacgagcatgaacggtggcaagagaagctcacccgatggctctttgaacagtcttcgcttgcccttcacacattccctccctactccaattatgaatgcaattgcctcttcggccggcgagatggtatcatgcctcattatcacgcccgcggaggtactgaaacaaaacgcacagatggttcaaggctcccatgcggacaaatccgccatgcgacaagtaatctggcgattccaacatcatccttggcgcctatggagtgggtatacggcactgcttgctcggaacctcccaaacacagctttacaatttccactctttgagtatgtacgatcacacctgattaaccgacgaagacgattgaaagcgactcggatgaacactggtcaaccaccatcggaaatcaaggatcaactagtcgaacgggccggcttgacgggtatagctgcggcaatttcaggcacgatcgcggcgacagttactactccaattgacgttatcaagactcgactgatgctttcggcaagtgatgctgctagttcccaacataaaagtactcaggctggtactcggggcaatgaggcgatatcttcggatgtgcggaaaaaaactaaacctggcaagactctcatttctgtcggtcgtgatatcatacgatatgagggtgtccgtggtttgttcaagggcggactgatacgggctggttggacggcgattgcactaggcctttatctcagcctgtatgaaggagcccggttttatctagagaatcgacggaaggagcgcgagcatgtcagttagagacttggaaagcaagctggtggcggggatgaagggatctagtgagaagagcggtgttaaagcctttcgtttcgctgccgtctcagtgagaatattcatggctactcgactcgcaaatttccatcaacgaccctagaagcccgggcttggaaaaggatatttctttgttttctaaggttctgatgtgtccctttgattccattttgaagacaaagaacaaagacgggacctcaactttgtgaagcacattgtatttagtctcccgagactgttctggataaagaacaaaggtaacaagagcagaaggggtgtctttgagttcaggtagaatagtgtgaccaaggcttcaattatataaatcatattcccaccttgcacgtaatcgtaggtccatcccctactagtgtgtttcgattcatctattcaatccatttaagcgattacaagatcgatcatgccaattccatctggacatcaaggtctggacatccctatgattaccgacgaagactgggatgcagatgacgaggactctggttcagatactacttccgatagctttgacttggtgccgatgtcgacggcactgaaaccagaagataaagtccgaggcttatgtaccaacccattgtttcatttcacggtccaccgtgaagaacatacgtttccaggccagtgcggtaaatctgatggctggattaacacatctcattttctctggaccatgtgcgctacactcgcggattcaggaaccgatccggaatgggcagcgacattcgaagaatggcgaccccagtggaacaaaatccaggcgcaggtgaagagattcggatacactcacttttcttctgagatcgctcctgcaccggttgatcttgtgttggtccaattctttggatgggggtatagtggagaacccagagagtttgagattgaacaggaggacccagatagtgtctatgactgccaggatatgtggaccttttggcgatacattattgagacgccggcaagtcagattcgacagattgttgtttgcctcaaagatactgcgaggcttgttggctctgagtagaatgtccgtaagatactttgagaatctgcacatgtgagggataatccttgccgttgagtcaaatttgtttttaatacttgctcataacccacccctcttccttaaatttcagtaccgccttcctgatcttagtaccactcagaattctgccatgccatgtattctgcctacttctggtttatatagtaaaaagacatgcatttcgattagaaaaatcgtatattctacttgatacctatagagttaaaccccttgctggataagcagttaataaagcagtttatgataaagcagttgacgatgaagcagttgatataggatatgacagaagtgacttattttttttagttgcttacatacaaaccataggtacctgctgtcttgctactatcatatgccgtttggaataaaagcggtaactatacaaattagggcgcggtactccgtaagaagcaagtgtcgaggcaggtgctcaaccaaattaggaaggcggtactgaaaattcaggcaagggggcgtgtgagcatctaagggggtatgagcaacaattccctattagtatctcaccaaattacgatattctcacgtaagaagtatacgagtgatctcgacggccgcaggtcggcgagatagtcgttgcgtacgtaagactctctggtttatacttgctacgcctcgctccgcaattatctgatgcctagtcacatacatgttccatgtgcttatttatgactatgtgtaccggattctccctggtggtgggggtttcctattcgggctgccgccgctttatgagagcgctcagactcaggctctcagagtagatatcatcatatgctatatgtttgcttgcttgcttgctagttggttaacgtaattcccggccaagctgcgcagcccaagacacatagtaaaagcgataaataacaacatgatatttcaacaacggttgtctacatgagcttttccttctagtctaatgctttttatatgacatcttgctacttattgggtttaggaggatttgataaattaatgactgagatatatatatttcaagggttcagcgacatagttttcgataccataatgatataagttctcgatttattcataactgggatatgatactaaaaatgcttatcaattgctatcggcatataatggaaatgaataagagcgttggttgttgagatatcatgttgtaatttgtcgcttttactatgtctcactcggccgggaattacatttaactcacatggccgcttaatcattctgttcataccgccttcctattcaatacttaagggctttaggaagcctcacgtgtacatacgccttccttcgccgaaagaaatgcccaacctagagaacctactggaaattatgtttacgatcgcaaatgaattgaagaagacccgagacattaactcattggttcgagcaagccgttatgtgttacaatctgactgcactcctgtatcgcactgaaacgttcggtcattctgaagtaaagcaggccttgcttgaaagcgctcagattggtttgggttctctgaagccggtcccggaagggtggcaatacatccagaggatttatcggaccatcccacccaaccttcccaaagtctccacttcacacctgagctctagtaagatgtggagatcataagttcaattaagaaacccatgaatgtatgaatgtatgaatgtcttgaaagtctcaacactatgtagaaaagtcaaaggttcttgaagagatcgactaccagatgttctgccatgatgcagtgtaaacaaatgcaactgatacaaccaacaaccacgaccatcatgcacgcactccatagcatattagttgagccagttatccctgctgctaagagtttttgtgacacagaggtgtcaaaaccgaatttattatctctcatacacccttccagggaccagggtcgattgcgtatcttctacgttaaatgttcgttcctttcgttcgcttcacctatgtttccgtgcgtgctgcactgacttcctgtatccagcatattctggtacatgggcttgaacatgccagattctttgttgccagtaatccttctatcccatgaaagccctacttctgaagagaaaatcccggtcaatggaaatgtgtctagatacgatatcctccttgtagcattccacaagccttataacgatagaaagacactcgctacggctagcaccgtaaattgagaccgggaatgatatgcaaaatcccctcccctggtgtatgggctcagagtcgactgtgaactcgccgatttggagacgttcaactgtaagattcatcaactcgtcatcggaacagtggcggtccctgttagaaaatctcaccgtaaaccacaaggtgcctcggaacaagccatactcatcgatagtaggaaagccttcacggagaaagacggttcgagtggaatgcatgttatggtcctttgacagtaaccccagacttggaaatggctaaccacaggagtaaatattctgccagttttgctagataggtgtttgagcagccggaggaaaaggtaggatttctttttgttctgctaagtctttcatcgtctagccttttattttgggatgtgaaggctttgttattgtatccttccatcaaaagctcaaggcgagaaaataggttcagagacctgaaagtcaggcactacaacaaaggaaggatatagactttgttctcattccattcaagcacaccataagccagactatataaggtcccaatttaccttctttttaggaatattccatttttccagtccaccggagactttcaaactaccaattttcactgcggatattatccaccaccaacatggttgaaccaaaaaaaaccatccgatctggaaaatcctctgttgaacgacctaataatgggtttaccactgagcgctcagttggcggcgagcgtcgttccatccgccactaccacgatggtcgactatcgcaacgtgagagtcctgtccctggccctgtccaaacactaatcaagaccaatattatgtcgaagacaaaaagcactagacctttttccaagctcagggaacaggaaccggaaccggaaccaaaactagagccagaaacggaatatgaatctcctactctcgccgaaattgagagactctccggtgctgttgctacactcttccacccagaccgttctaacccctctgagaagcctcccccgaggacaatgagcccacagtcatggagctccgagagctcatatggcatggttactccacccttccctgtagcctcccctactcctggagattcacccgaactcatgagcacagatgtgcttctccctccagcgactgctaggtctgatggctcagacgatgatgccgacagtatttcaaagaagtggaagaaactgggtggaaagaaacgcattggaagttcagatattcacgactaactggatgtttaccaagaaagattttcttctggcgacgtattatacatgtaggaaagtacaacgtagacatgtagataggtacatggcgggacccagaggactagactaccatcgtacgccattagtaccacagtggagagccaaacttgctccagaatgaagttgaaacattgaaaattgattgccatatccaaattaaagaatgccaaggataataattggcaaagtgagcaactcgatcactatctggacaaaacacttcttcagatgaagttcaatcagccataaaaactgaggaacgccaaaagacttcaatgaattgctaaatgcagcaagtcctgaagggattctgcgtcctccaagtatctctgcaatagttgatccacgtttctttgtcggagaaggaatgattgtctccaagttcatcggtagaaggctagcttcggtcattatgagagtgatagatgctggcagtagtcctagcaaacggaatgcaagcatgatgatcactgcaaaaacctcgacactagcgcgcctgctcgtggagattggcatttcctcgccggaagaaatcattgacctctggattagactctgggcttcgtacatcaaggcttggcaaatcccatatgtgaaactagggactgccaagtgtatccatttcctttggacttcatcttctgtcaaagagaagagtcgaagtcgatgtgctgagatagtagcacaagtccagatcaaatgaagtttgcacagcagaacagaggaacaggcgtatgcaaatggtatcagtaattcgtgtcttagaattgcgaattccaagaaagatctgatcgcataatgagtgacctgatagacaaggcctagcacaagcgcataggagaatgtgtgaaggctctgtgtagtatatatgagatgtatggccttgtaaatggatcggaaggtcggaggtcgcttgttccccctttcttgatctgacaaagccccatccgctcgagcaatctcaacgatcaaagatgtcgctactacatggccaagaagataacgaaccttgttaaagatcgattagaataaattatagggaagatggccagacgaggaacttaccaagccggaaagcaaaagccggctagaaatgagagcaaaagaagaaaatgtgagctctttgtgtatggtcgtagaaagggaaatttggtcaagcagatttccatctcctcctggactgatcagaatgttcaagacccgcgaaggtaaacttgcaaatacggcctgactcaaagtgagaaacattccaaatcgtaattgatgggaaattgttgcagcgaggagattcaccgaaggcagggtcgcactacactctgacgataataaatttagaaagaaagaatggggaaaagatagaattgggctaagccaacgttcatcggttatactcgcacggtttaaagtcctggtcgatgtgttactgtttgcattgtttacaccatttgcactgtttgtactccatcaacactcccatcctaatgcctttccttttttctcttcctcgacacttaaattctttatgaaatgcgctctttcctctgaggatctggcagataacagctgagggtaatctttcactcaatctgactaatcgttcaagtcagtttcttcctcaagcttacataggggtcaggttccgaaccctgaccggataaacctcgggattatttatgttgtccaataacaatcgccgtccctcaccaaaagaagccctgccaagaaacccatgtaagcagctaagcattatttaggtacagagcggtgctgcctgatgtgacctcggaatgtctagcaaatcccgacaacccggtctgtcgagagtgactccacaggactgtcaattgaagatcaatcaccaatttaggccgaaatacagagagagcattgcccaagcctggagtacctgcttacatgtaagattcttcgaatccttccaacctcgagtttgtagaagttcgtcagcttactgggggcctctatttcgagaatagctctcccaaaactctgactacccagagatccatggacacgatcattcgatcacgcggcatgccaaacttgaacgttactaaacaaacactgccgaaaatctataacgcactttaatcatgcatacatgccctgaggattgggcaaaacagtggtaatatagcataggatgaattctatgcattcagggggcggcgatactagtcgcactaaatcaccctagtcaggaataaaatgaattctgacattaagagcactagggctgacagctccgcatgacgaagtaacattcctatggggaccgaatgtccacaagtgctaatcagcataagctcaacggaaaaggctcatacgatctccgtttctgctcgtatcgaggccggagaggccacatataaaaggctcattgtacgcccacatagagcttcacaaagaagaagacgagaacatcctgtccttgatcaatcaatcaattctctgcgccgttcttcccatccaaattccttctcctacaacacgattcggtatcctcgtcccaaaacaatgttcaagaggctttccatctctgcctgggccattgcggttctagccactaccgcgcaatgccagcaactcagctatgaagatagcattgccgctctagcgtacggaaacgtggccaccgatacctcttccgcgggcgaagtctggctcaacgtgactgggtttgctgtggaggagcttccacacattcagagcgatgtgggaattcacacattggacaacctcgagacactcactgctattgctggccttgcacaagacgcggcgaagagaggtcagtggggagacattgtctacttgcatagtgctttcagcatgaatggccacgtcgatcatctcaatgtttcgagtgtcgagatgcaggagtcactcctggaggctgttacaaaccggaccagcggaaaaatcgactcccctttagtcgagctttatgccaatacctcgagctcgacattcttggctgaagcttttaagaatctcaaatcagacgcaaatccccaaagaaaacgctggactaaagaagcttgttcaactgcccaccgcgctgtcacaagcgcctgtcgaagcctccttggaaatatcaacgacaatgccacatggaagtcaggcggtcctcggaatatctgccaatatggttgctgcatcagttggagtgcgaacgccactttccagctccagaatctctcaagtgctggaaactattgcgtgaacgcgtgtgcttcgagcacagtcagttgtgagatatatggtgtcacattgcaaggaactgtcgtggatcaatgtttgagtaacagagcaaacggttgcacgtaatgagggaaccaccatgacctcattcgaagcagatctgcccgaagacgggattttcctatggtctattctcaagggttgaattcaatgactgagtttcttgttggtttcttttcttttgcggcatttacttgtgatgcattctgacgtgctcactgtcgccccatgcagtttgtagacctctctgtgtggcattcctttccctttctctttctattctctggcagacagctcaccggcaaacgcgcagcttgccgcgtccgcgctttcctttatatgtctgcagagatacttcttctgtgttcttgtggatggaatctggctggctttgtggtacgaaactatgtaaatagacttcaatacagtagctagtttctgatcctccatgaatatcatctttttgcctctggctgattattacttcccttgtagtcaggacctttcatcattatcttctgcggtattcacttgtgtatgtagtatctcatccattgaaattaatatcgctccggcaacttcatgaagccgctcgggtctttctcatcacatacacccctccacagagtaacttatatttattttcaaggctccctaaagggcctcacctaaaaagtatttatctaagcaaactaaaatcctttctgcctgaaaaacagtgcagttacatgactaagcgagctaagtgtcccccgcaggtagattttcattatgttcgtgatttaatgggatcttatctggacgatcttcactatttccccttccctgtattgtctttattatctctattcgaacagtactgtggaggcgtcaatggcggccccggcgatcatgctatgatcgaggaggcagtgcgactcaagcataccaactcttttaaaaactgttacactatgtttcaaggcgacatgtatgccacatcttactaactcatggctaaagaggctctggctatttttgaacccgcaatccaagctcgtatctgtgttccacagtcagtcggagaatttattatccaaaggcagatctacaccttgcaaaccctcaatattctcattgacgatattctgagcggctcgcaaacacgaattcaaaaggccccaccaaagaagaagaaggctactgatgacggagcgacagtggctatgtcgaggctcagtatcaagggcccccaaacgcggcttaggctttccgacctggtcgccagggctcgtgatcaccaagacacacttgaagagtactgggtttgctacccactgagcctgttgtgcttgctcatgctgtcaatatttggttctttagccgcccagaactcgttcccgacgaaaagggacggcgattgccggttcacactgataaatacatcagtgctgctgttcttgaggctatcaacagttcgatccaaggagccgccatctggaaatacattgctagtattcttggggtgcttgacaagtgtgttggggatgatgcctctcgagttgttctcctccaggagatctccaacatatgtcaagtagagttaaatcgtgcgcaaactctgttcaagcgacatgttcagagtgcaagcggctctaagtggttcaagcgaactgccaatgtgtatgacagcaccggtagccggcgcgtttctataaaaggcaatctggaagaccttaccgtatctgacccccagctccattacatgttgcgtctctgccagccaaagctcaatgtttccaccgccactacctggatcaaaaaactgggcgagtatcaagaagcccatcctagggagagggaaaatctggaagatagagaggctgactcattgggtgacctggctatcatcattggatttatccatgacttgtcctctgtgcttccaattccttccttttccaacaaaaagggccagatgtttgccgctaagtcacaggtggtggaatctgaattaaaccagaccaaggatcaactcgacttgctcgattacgtcgttcccatcgataacctcctagaaccgggagtgcccagtgaagctttgaaaaagctagaccaattcatcatcgaaaaatccgggacaaaattaggattcttgtaccaagacatggttgccgactgcctgtctggcgttcaggctcaatgccttgaagccaaagaaaaagtggcgcagggctagaaggctgaatttccttctgctccggcaacgaccgcagagtcgacggcattccgagtcgaacagcggaaacagaaagaaaaaacgcgtcccgcacattcatccatctacgacattgttacgcctgtgaagccgtcttgtccacaggagccagcttcgctgctgcaaaccttcaagatagacgattcgacagcagaggtcttctcgagactgttcagcaaatctcaagcacgtggcccagccgcctgggcggccttcgccgaggcgatggctaaattgggattctcaatctctcccaaatacggctctgtttacactttctatccacccgacagcatgacggcgaagaagtcattcacagtgcacagaacccaccagtcgaaaatcgaaggatatcgggttctcacggtggctcggcggttgaggactttctatgggtggggtgaagagacattccgagtcaaatgagttaatgacttcagctcttctcagagggatttattacgatactactacgatgtttcaatctctctttgaagacgtcttttgaaacgtcttttgaaagtcttttaggaaacttgaatactacgaaaggcacaattgccataaatccgctttttgatccaattaatgcatccatgttaggtccctaatggttgctatgtatgcaagttgaactatggccataactaggctacaggcataagtaggacgataaaacgctgtcccttgctatttcacaaccattcaatctcccatgttggcaagctagaagccaggctcagccagaatattcataatgatgaaatgaacacacatgtcgcacttagggttgataccaagtctcaaggccagctgtggcatccttatccggagcaaattgcagattttgggaacatcaaacttgtaaaaatagtcaattacagtgatgcgattatggccattttcgtcacaagccgtggcaagggaagcttgtgtgagtcgaccgacgtactcaatgccttgttcacgcaggctcactttgacatctgcaatggtatctgacttcggctgcagtctgataaggcgagcttggtcttcgagccatgacaggaagttggttcgctccgtctgatagtcggagatgggactagacgcggacattctgagtctggatgaacccgagacttgtcgaggcgtgtgcagcttagcaggcttcgtggctgattttgaggaatggaaggttcatgaggtgcgtgggtgatagaacaggcttggagcttgagttggttagccatggtgtatgggatgcaatagaaggtccatgatactttgataaggtagagatatttagagttatccagctgggaggaggatggtgagaacaacgcatggttttataccttgcgatcattggagaatgaatggcattgaggttgtccacttcaaatcctattgagaaagagaagaatagcaacgaggccattgatgccgcctttaggatcaggccacactcttcacttctcagaatcggatttattcgatgaggtttacttctttcatctgtgtagcctatgttatacctaagcttgtttaaatgcatttcatccctcatgatatatagaaaaggactcttacagtctagacttttatatataaccttcgcataccgtacataccaatttctattcggtgctattgttcatttctttcagttataccaggagaggtcattcaagttgcacatccattcgctacggactacctggttggcgaacatagagcgtcatattatcataaagattttattgtagccaatgaaaccattcataacagagaattaacgcgtatattgctgggtcataatatcatacgaactcatacatgtcatcacatctgttctgtcggaatctcgtcgcagaccttgtaaataaccaaaaagacaaacataacgctgcaaccattatacaaaacgaaaacaaaactttcaatacacaatgatatataatgaccaaatcttggtttacaggttcgtcaatttgcggaaccaactggtgggcttcttagcatccgcactgggcggagcgggctttatctcacggtcacgttcgtgatcaccacttccagagctgctcttcacaccttcacgacgcgaattatgatgccgaggacgagcatcatcaatctcttcttcctcgtacttagcacggcggtgggccttgcggcgaagaacacgacgagcttcctcatctgatgaaagagaatgagaatgagcattgccaccttcatcgcctgcaagaggaggtagatcaataagagtagggactatctgcggtggctccggaggctcatcaccttgcgagtaaacccacgaggaaatcttgtctttcgcactcccgccacgattcaacgcaccagtcatgagcggctcgcgagttaactcaggggccaccttagacctgcgacgacgagcgttcgggtcttcatacgggcgagaggtacgggttcctcgacggtcgacctcacgctcatcaggaaagacctcaacagggatcctttgctcacgttcacgacgccggctcgttctcgcggcgatcatttcctcttcgcgcattcgccggcgctcgcggcgttctgcagccttagcttcggctgcagcttgggcttgggcttcacgagcagcctgctcttctcgagcacgacgttcctcgcgcgcagctcgtcgggcccgcttttcttctcgtaggcgatcttcttctttcagacgttcttcttcttcctcttcacgagcacgttgctcgcgcgctcgttcttttcgcctcgcgcgccgctcttctgcttcccgagcttcggtttcacgagagtcaggaggtaccttgcgggatccacgccgcgcatgtcgtgctgcgcgccgggcttccgcttcatcggcttctgtctcgacacccgctgctgcaccggcggcgtcgcccatgaacccttcggtatctggtcggacagatccgcggcgtcgatcttcgcgacgcgatcttcgagcgccgtcgcgctccatttctggcggatgtcttccgtcgtcatcacgatacgatcgcgacctgcgtctgtcgggcatctctggtcgttctggccgatctgggcgtgtgccttttctcagagaatcgaagagccccatgaatccaccgctctcttgtttcttcaccggagcggtgttcgagcgctttaggcgacgttcccttggaggagcatcgaaaaatgccatatcgtcggggcctgacataatatctgcggtgggatgtgcttgatatggatcaaccaggacaacatcgtcctcgtcaggtctgtgccgcggctatgaaaggcggtcagttggtacaacggcacaacaaatactgtgcttatcccgacatacctgtctccttgacctgcgccttgagcccttagagccttccttgggtgaattcctctcggcatcctccatgtcaaccacaacgaggtcatcgtcctcgatcgcatacggatctcgaactgtttcgtaggcagaaagtcagcaagaataaatgagttatgacgtaaatgaacatacctgatctccgcctgtccatgcgcgggcgctcacgtcgagacttgggaggatccatgcccatcagcctggctgctttgtcaaagacctcacgcttctcatctggacgtgctagatcggcagttctgtcatctagattaattgatggacgtctggatacgggtttcgacgaagaaccagatttgcgagtggatttgcttttggactggggtgtacccagtaccatattggccaaggtcacgccacgttggttcttcgaggaccgcccctcacggtctcgccgcttctccctgtcagacgcagacctttccacttctggttcggggtctttgggtcgaggttttccagtagactcttttctctttggaggttcttcctcttgaatctttgcttccttctgacttaacttctttggaggttctgcttcctcttgaatcttgttttccttcctcaacttcttcgggggttctgcttcctcctcctgtgtcgtgttttccttcttactcgacttctttgggggcggcgcagccccccaaaagccccatgatatggtgttcgtgttcttttcaccgcgtgctcggtccttcttagatgattttggaggctcttcagcaggctccggtggaggcgcggcagaaacatcttcatccttctcttctggctcgtcggctacgggctcgggctcaggctcaggctcaggctcaggctcaggctcaggctcaggctcaggctcaggctcaggctcaggctctggttctagcgcaggtattttttcaggaggtggggttggttccctagcagcggccgctgcggctgcggcggcagctttttctgcttctgcctttttatacttcttcagttcctttttcgacatttttgaaagatccggggccggtggctcaggttccggctcgggctcaaccactgtctctggctctggctcgggttcgggttcaggcctgggctcaggatcatctccaaagtctgggaagcttccagggatagagtccttagagactttcctttcttgagactcaagagtttctgctgtcttagactttgttcttgagcttttcttcgttgaagcacgctcctctataggaggttctggctccggttccggttcgaccttcttttctttggatttgctcttcgagctagccttttctgcctttgccttctccttcttggcgagctccagggctttgatacgttcagcaacactgagcttggaagccttaggcttcgatatcttttcgggttctggttcgggttcaggctcaggttcaggctcaggttcaggctcaggctcaggttcaggctcaggttcaggttcaggctctgggggattttctccaacgtcaataagaaggtcttcctcttcctctttcaccttaatcgtttcatctgccttcttcgttgttttgcttttgctgctagaacccccagtcagggtcgaccagaagccttgagaggctttttcctctttcggagcttcgatggcttttgtggttttctttgtgcccttggaggttttaggggctacttccgcccaaatgtcatcggcattgtcatggaaagcttcgggatctggggttaagccctgagcaggaggtgtcggcgcacgtgggggaggttcttcaatattactgcccttcttcttctttttcttgtcctttgctggcccccaaatcccccaggagctctcatcggcaggtttctctggttctggttcaggttctggttcaggttcaggttcaggttcaggttcaggttcaggctctggttcgggttcaggctcacgttcgggttcgggttcaggctcaggcaccggttcaggttcaacaactggttcggggacttcttcggggggcttgttcgatggaagctcgaagtccttgccgggaatgggcagtcccttacgtatcaatgttttttctcgcttcttgcgttctttagacgatatctcatgccaattttcgtatagagggttatcaggcacctttggcgcctcgggttcgggttcaggctctggttcaggttcgggctcgggctcgggctcaggttcaggttccggaatgggttctggctcaggtactggttcggctttgcctttgcttttctgcttgtccttcgatgtaactccccaagcggcaaagggatcaactggctcttctgctttcgccggtggttcatcgatgacaggcaccggatcagctaggaggtcaatcttcttcttcttcttcttatctttggttatcattgaaagaccccaaccccagccagtatctgcctcggctggttcctcgatttcctcggccaccggttcaggttcaggttcgggttcaggtacagccgcagctgctgctgccgctgccgctgccgctgcctcagcttccgcagcccttgctgcttcctgctctgctgtctcctttgctgcagcttcatcctcctctttccatttcttctccatctccttcttcgttttacgttgctctctctttggcagatttagaaaccatgcttccttcgtgaaatcgactctgggtgcaggagccggaggcgcaggcgcttcgggttcgggctcagtctccttcattttgtctttgctcgcatcccaacctcctccccaatcatctttttgcttggtttcaggcggtgcagatcctaagtcaaaatcaaactcgccagtctctgacgtcttcttctttggggttgctccccaggggttgctgtccttggattcgtcattgggaggagggtcaaccttgctagtagtccaggctttgccccatcctccgaaactaaacccagtccccccggtcttaggggctggactgtcgaaattcaagtccaattgcggtgccccgtcattcagacttatgtcttggaaccccccaggaggtgcaatctcgtcctgtaattttacttagacacccgtcttgtacattggagcagaatggtcttaccttccccttcttcttcttttttcctacattcgtgaaggcagcccacgagtcatcgcccccatcttcggcccagctaagatctttggcaacagaggcttcagaggcctttcgttcttcctcttccttggcttttctttcttcctcttcctcctctaatttcttcttcttatccttctttccgctcacattccaatcaccccaatcatcacccccatcacctccatcacctccatcgccgcctccagcgccgcctgaatctccaccagccccaccggcaccaccatcaccgttggatttgtcgtcgtctccaccagccccgcctgccggtggtggcggtggaggagaggaagtcggtggtggtgctgctttctttcctgttggctttttcttcttatgttcccgaatacccgtagtattcccaaaatcaattcgtacatccagcattcgatctttcggcagcgacgatgacggatcacgcgatttttcacgaggctttggcaggagggaaacaggcgtcgatctgcgctgcgcgagcggaggcagtgcagagtattcgggagggagatcatggattacatcgtcgtaggaaggtggaagctggtcgtaggacggtggttctggtgagcgagccgcaaagcgagaactcaatccggtgactaaatcttcttttccgggcacccagttatctggccggcaaaatcttgttttcttagtcgagaaagtagtccagacctcgcggaggagtttctcccccatttgcacatcccgtgcgtagtatgcgacatcctccgcggcgctagtcttccccgcacatacacgataagacccctcaattacttccatatcgaaaatcgcatgcgccgagctcacggtcggtccgatcacttatatggcaactcagcgacgtccaatagcgaacgcatcgatcgatgatttggattcaagtcctggtggcgggtattgtcccaatcgatcacggttttttggggcgcggagttgcgagagtgcggtattggtgtcgtaaggttgcgcgagggttctgtgagactgtgaggcaatatatcaagttaaatttcagtcaaatggcttccctggacgctcggcgcgtgtttaggtgctgttcgatgctgataagatgatgtatagacgggttaacagacggcgagagtctctaaaactgtgcctgctataaattgggcacaaggaatttcaaggagtcaagggagtcaagggagaaaagtatgaaaacgtgagactggggaggggatctggagaggcagggataataagttcaggcggtggaggtgaagatcatcccgttcagcccgctaagttcaatgtaggcacgtactccggccgtacaatgtactcgtccaacgttgctgatgcatttacgtattcgagggtgttttgatattagcgtgaaaggtactcgagtcactcaatttatacatgttcacggagtacatagtatatgaacaccccttgcgggtgaaacaaaaacatagatggctgggaacacagaaggcacagagcaagtacgaagtacactgtccttgaaactaacgatatgtacttcgtactttatacataatgaactcaaacactcacgaatagacttttctctacaatctgcatgtcaacaaacaaacattgaacgttacacagacccgcgatgatagttccccgattccatggttcccaattcgagtccacggattatgagagtatatcttgtgtagtaccgtggtactgtacccaaaataaagtctaattccatagacacatataaagcacggatccatagatgtacaacatatccacagtccatacaatatataccgatctcatacaatgcaggcacacatcgtatactgcaatgcttgcatttctacccttgggttatgaccatagtcagcatacgttttacaaaagttgcatgggatacagggtactctccagatagtgcaaaattcccctcgagcccaattcactcgatgcatcccaatccaaaagagtcacctgcaagcgcaacacatcttttgcacaccgccacttgaacttcggaatgaagaaaaaaagggcctagtgcggggcaggtggagagtcaaaagggtcctctttttctctctgactcattgatttaatggtgacactgaatctgttatagctacagggaattgaatgaattggaaatgataagtcccccatggattcattatgatatcctattccagcgcttcccagctaaaccaaacaaaaacaatcagtgtagagaaatagattgacaggacgaagtagaatacaatggggatcgcgaggaaaattgaaaaccgcatgtgacaaacaagcttgagagtccaaaccgagctaaacacttccgagaacaacctcaactaggccggcaccatcccaatggatcccaaccaggttcggattttaggctcaggttgaaagcgagacttcgggtgattgatgtcggctcttgggtgctgggaatccgtacgcctcctcgtgctctctctcataccgttggcgatcttcgatttgcaatttgtagtagcgctagattactagtcagcacgtgcaattcggtatgtatcaattctgctcggtgtccttacttctttctctgattcgggtagttcattccaatcgtgggcaataagtgtgaatgcctctgttccgggcttcccctggtaatcaatggtttcgaggcggtctcccaagtataagaggtaggcagatttcgggagtttgggtagacggtcatctttgatggaagggtagttcttgtcgacaagacgtgaaagggataggcgggcagtgttggcatccttgatctgaaggggagtgtgcgacttgacccacgactcgtaggcaacagcgttagcagctatgttcaccttagcctgggcttggagtctctagatttgggagatcagtatatcgctcctgacgtatacggagaatctcaagggcacatacctcctcatcttgaggattgagggatgtggaatgctctacgccaatcataaaagcttccttgaccgggtattgacctttgatcgcgcgcagcttctcagacaaagcaagactgtaagcagaggtaggcagcttcttaggcgggcggatcagggcagtcgccttgagttctctgatctgagcccggagttgcttgatcttccgattttcctgttgtgcctcggtgagatgcggcttcttcgctttgatgccggcttttttggtgctcttcgccttaggcgtcttagtcgccttgggaggggtagaagcagtagcgaatgaattagactggaatagggaacggatggaggaaacgggttgggcttgcggacgcatcgacccagagttaacggttagacagatgcgactaagctgattctgcaagtcgttcacgccagtacggggagggagagcaccgcggtgcagggtgcggaggaagcccccccgagctgcagactgccaagtcatgaggagatgatcgatttagctggagcgagctgcaataatagagatcgaaatgcgacaaattagcaattgaatctcgaaaagttaagaatcgatcagaggagctgttgacgcaaaccgagtaggagtcccgcctgctttggtgtacctatccgcatcgggcctagctctttcacatggccttatgtaagctgtcattccaaacggtttgcgcaagtgacaatatggtagacaaacacctcaacgttctttctctcggtggcctgaggtttgaatcgtgccctcaaacgcttttcttacgaggcgctttttcttctcccttctctttctctccccctcctctttctctcctcctcctccatcaatccgtgtctcgggggcttttgcgttctagtaaaactcactgatcagcctgcaacaatggctcgccacggagatactcgctcaccatcacctgtaggcagcacactttcttcatcccgacgacctcgcagagaggatgatcgctatgacagaaccaggcgggatgatgggcgcagttaccgcagatcccgcagcccagaggtaagtgcggcgcatcgcatattcgtatcttatcttgcaatttctgaccatccttgtgatatttagagacgataccgcgggcgcgaccacccccgcgatagagatgcatttcgacgaccagatcttcccgtagaccggcgcaacgaagatacttatcggccacctcgaagagaccgatctcgagaacggcgacgaggcgacgaccatgatctccaccgcagaactcgtgatagggattaccgttctaggcgagaggactcccgggatcgggaccgcaggcggatagatgatcctgctgacttgaagcccaagtctagacgggatgacagtcgtgatcgtgctttgagccgacggtctagatcccgaactcgagaggtaagctgccagcgtcttcgattatgccgggccctttatattaactgtgtcccgcagcaatctaagccgtccacaccggttcccactgcccagaccgacgaggagaagaaagcagagagacttgccaaactcgaagcatggaaacagaaacaggccgccgaacgcgaaaagaaacaacgcgaacaggcatcagttgatcccaagaagatcctcgaggcgattgatcggaaatcggttgtatctccaagtcctgccgcatttcctggaaagttgaagttcgatccaaaggccattgctaaatcatcaaacacgacaaccgctccccccgctgtgcttggtatcgatgttgccgtcccggcatctgccaaagcttcgtctgtgacaaagtccaatatacctagtactgtgcccgacacgctctctgagcccttgaaagccaagggtaatgtcagcgggtttggcctgggtgcaagacaagttctcgaagcagagaaaccctccgcttctaacactctgggctttggggatggagacgagggatccacacgcaagaaactcgaaaaattgccgaccacgactctcgatgtgacggctgggcaagatgatgtagacatgcaatctgaaggaaccgacgcagcagctgaaacaagtgccgcaagtgaacaccgcgatacacgactccacaagcaaaccgaggatgtccatatggaggactcgacgaatacgcaggctgattccactcctatggaggttgacgatgctccagaaatcgaccctctggatgcattcatggctgatctccaaggctcggtgccgcctgaacggacaactggggccacgttttccaagaacgcgcaccatcaacccgaggctatgtttaacgatgacgaggacgtggatgtgaccgcagttggtgatgagaaggctgaagatgtcctcgagatggcacaagcgaagaaaaagaagcgggagaggcctgagatcgaccacaccaagatcgactatgagccgttccgcaaggaattttacactgaaccctccaaccttgccgatatgaccgaggaggatgtagcaaacttgcggcttgaactggacggcattaaggtccgtggttccggcgtccctaaacctgttcaaaaatggtcgcaatgcggtttgggtgttcagacgttagatgttgttcacaagcttgggtgggaaaccctcacatccatccaagcgcaagcaatccccacgatcatgtccggtcgcgatgtcatcggcgtggcaaaaactggctcaggaaagaccggcgctttcctggttccgatgttcagacatatcaaagaccaacgaccgttgtctagtacagatggccccatcagtatgatcctggcgcctacccgcgaattggccacccaaatccataaagactgtaagcctttcttgaaggccctgggtcttcgtgctgtctgcgcgtatggtggagccccgatcaaagatcaaattgccgagctgaaacggggcgcggaaatcattgtatgcactgctggtcgtctcatcgatcttctggccgcaaatcaaggacgggttctcaatctacgccgtgtcacatatgtcgtcttggatgagggggaccgcatgttcgatatgggctttggaccacaagttgtgaagatcatgtcgaacatccgaccagacaggcagactgtccttttttcggcgacgttccctaagagtatggaagcattagcccgcaagactttgaacgagccagtcgagatcacagtgggtggcaggagtgttgttgctccagaaatcacgcaaattgtcgaggtccgtaataaagaccagaagttcgtccgcctgctcgagctcctgggaaatctgtacgaacacgacgcgaatgaagacttccgcacgttgattttcgtcgaccgtcaagaggctgcagatgacttgctcaagcaattgatgtacaagggttatccatgcatgtcgattcacggcggaaaggaccagattgatcgtgacagcacgattcaagaattcaaggctggcgttttccctatcctagtcgccacatcagttgctgctcgtgggttagatgtcaagcagctcaagctagtcgtcaactatgacgcacctaatcacctggaggattatgtccaccgtgccggccgcactggacgggctggcaacaccggaaccgctgtcacgttcgtcaccgaagaccaggatcggtatgcgttggatatctcaaaggctctcaaacaaagtggacagccagtccccgagcctctccaaaagctggttgatgggttcaatgagaaggtgaagtctggcaaggagaagaatttctcacgccatgggttcggtggtaaaggtctggaccgtctcaatatggaacgcgaaactgcgcgacagcgtgagcggaaagcatacaaaaccggtgacgatgacgatgaagatgacaaacttgagacccagcaggagtcagatgatcgattgaacaaggctatttcagctgtccgatccagtgctgacccggctgttgcaccggctgcagcttctatatcgagtgtgccgaaaggcattgatcttgatgggaagattgttgtgcatcgtacggagagagcaccggcgactggttcaaagaacccgctggataaggtggggtctgctgttgcagatattcatgcgcgtttgagccgcgcgggtgtgatgagatcaggcgtgcctattgataaccgtggacctgatgccggagccttccatgcgacgctggaaatcaatgatttcccccgtaagttatcccgtattccttacatctttcagacaattacttaccactttattttatcttgcagaaaaagcacgttgggccgtcacgaaccgcacaaacgtggcaaagatcttggagacatccggaacctctatcactaccaagggcaatttctatcctgccgggaaggaacctgcccccggggagcttcccaagctgtatatcctggtcgagggtgagacggagatttcagtgaccaccgccatacacgagcttcgacgcctgctcaaggaggcgacactggcagcttcggagggtgaggcgcgggctccggtgggtggccgctacactgttctttaggtcataccttagttcatagtagtctcctagatacgttttcgaaacaaatcaatgattgtacgatatgctttgcgtgtctcaattcttgtaaaacctaaagataatgactatattcgtgattactttcatccggcagtggaactggggaacattggctaatcggaatgactgccgaggcattgtcagatcatctaacctaactatcaaagagaagcttgcttccacaattcatccacaaacaacgagccaaagaactgcagcaaaagaaaccagatagttcgctacaaagaagaacaataagctcacaaatacaacgccaaaaaaacaaagcccgggatataatggcagtcgtgatcaaatcaaaacctcgcataggtatgcctattcccatctccttgcagcttcagccccatctacatctcgcgcagccctctctgtgcgactgacttgatccaatgtctgcgcttgagtttgtgccttctgagcagctagctttgagcccaatttccctttattggctaaggcgccttcggcacgtttctgtaacacaacacaagtcagcaatcgtagctctacatagcatatatagagggaaacaagatatcatacctgtgcggcgattgcagcgtttgcacgtgcctcgtccgttccagcagtactactacctgtagtgctttcacccagagtacggccgggtgtagccttccagtttgtcttggccggaagtggggcgcggggtgcggcagttccccctgggttggtgccgactacacggccaggctgattgaaagggtctgcctcattggaagagcgggagcagatgttgcccattgtgattgtgtagtgagtcgtagggatcggagggtatgttgcggttaggctggggttggcgcaagatggagaaggtcgttgtcgttagagctccggctacggtgcggagttgatattcgagtacaccaattgaatgcaggatgtttcgctagggtagaatctgtaggcgctatgctggctgtaaatcaagttgtacgatgttgtgttgttgttcgcaagtcatcgcaagtggatgttggagcattgcgataaggctgatccgatagtcgatccggggtcaaaggcggtgaacagggtccgaaactgattttagtaagtcgggctgtgcattgatgcctagtaggatgcggtgaagctaaatacatggccagctcatagattccatggctgattcaaattgaactttttcatatgtaccgcatgcaaaccgcagacaaagttccccattagggctgttgaatggcaggtcggactatatgggcagaataaagcttagtcacgatctcccttggggaaatcatctccgcatgggaaaggaatttttcatcggaatgctggggaacatttttcgagtctgaactgatctcatgtctctgtttcctgcagttttgcctctgtcttatatccatcataagatttcctgaaattgatcgccaaagcgtgttctgcgattcgctcgaaaatcatgacgcctaacccccaaggtcctcatcctctcctacgtcccgaaggtcctcacggctacactgaggggtctcagtcggcacaacgttatgccccctaaccctctcgaaatcatttgaatttgatcctgcacatctgcgactccaaggtcctcctttttgcttttcctgcacgtcgatctcggtcaattctccgattgcgcctgttcgcaattagtccagtacaagcgcgtgacacgattgcgaaactatctgcactgtgggaggatatcattcggtgctacaacctaaactgtctcctgggagcggcgcacatactgggtggcgctttgactcgtgggttcgtgattttgtagtgggatatcgtacctgacggacattcactgtcccacttacggtcgcacactgctcggttcctcaactgtattttccccatatcgttcgtcttacacactgttgtgacgacagctttcctggccaacccggttcaatttcgctccaacaccttccctctgtcatctgaagtgaaccgtgcaccatggcttccgaaacccaacaaggcgatttctgccttgaatgcaactgggaagcgttccatattgatggcagacctgcggcagatccctcgggtaatgcgtttcaacatcattggaactgttcaagtcatgaaacccagataccgctacccccttgtgaggtcgatgaggcctgctgtgatgtagacgactgcgcgctagactgcgggtccgtatgtggccactttacgggctgtgacacttccactgtctgctcagtcactcattgcgcggatgacaactgtgatgatgataactgcgacgataaccattgcggcgatactcattgtgataccaaccactgcgaagaggatacctgccaggacaaccattgtgaaaatattgaccccctgtgcttcgaagaccactgctgtgaagttaccgcgagtcaagactgcggctttgatgctatgtttggactcaacaaccaactgtcgctagacacgggcgctttcccttcgatggcaatgggaaatcattccgttgggcatacgacaaaagccatgcaacatcctttccctggtctcgtcgatccatttcaacaggaaaacttcctatcctcataccaaacgcatgccacccactgcgagcaggatgtatccaaccacttcgagtgccatgatttccagaaagactggcaggggatgttcgtgtcgcctcctgctcccacacaggccgaagttaacccagccgaggttttccacatgctcggtatgtgctctgacttctcgatatgccaagatcaacacgtacctgggcctcagaccagtgtcgatacctttgagaaacccaaaatcgacacgtcaaatgcattcaattgcttccatcccggacatcatcatgtccacagccatttcaaaaatcccaatgatttcaacctgcaggttatccgcaaaggacctcaccgcaaccatcatcgctgccgagctcacacccatgctcatgctcatgctcacgcccattctcacccgtattccccttattctcgacagtctcgctcaagcatcagctctcacctcatttccagtccgggagaaaccccaccacctctcgaaggcgactcctcatccgtactcaccacaccggacttttctccagccgacagtaagctgcatatctgcaagtggacaacggagattcgcggaatcaaggctgcttgtggtgccacttttgccgactgtggctctctacaagagcatctcgttgcctgtcatatgaataccgtgaatggtgccaagggcaatgggtactactgctgctgggaaggatgtcatcgcccggatgagccattttcgcagaagtccaagcttcaaggtcatttccttacacacagtaactgtacgccatatctttcatctcacgatctaccgagggtaggacaaatgtgctaacacgaatggtatccttctagacaagaatttctcatgctcggtgtgcggcaaggcatttgctagacaagcgacattagaccgacacgagcgcagtcatcgtggcgacaaaccatacaaatgcaaagactgtggtaaatcatttacagacagcagcgaattgagtatgtcgttgtcaaattccttttaggatccaccgctgaccaccccagaaacacattcccgaacccataccggcgagaagcctttcaaatgcacctggccaggatgcaatttcaccacgggcgatgtaagttgtccatctctatgcgatatactggctcatgttctaacatcgaaccagtcttccaatatgtctagtcacaggcttagtatgatacccctgccatctcaaatgtttaatttactgactctgtctagcccacggagagcgaaaacataaatgccttttcccagggtgcactaagagctttacacgtcctggtaagttctgacctgagctctgttcttatcgcctacatgctaacgttaatttctccgtagaccaattgaaacggcaccagaggacaacacataaacaagaagcctgctcgacactcccatcaccgagccccgatcccttcactatgacccccttcactctcgtctaattatcaactcctttgaatgcatatttgaatgcgattgtcatgtcttatgacccaacggatttaggcgctatttgccgccgggcgtactatggaagactgagaaacactgtgtttctggcgttttgtggattttcgagaaccaccaaaaagataccacctggccttgatgttgccaggacttttcaccaaggattttatcgatatattgttttacccctgaaccgatcaaatctttgattggctcaaatgatctatttcctatgtgttcttattatgttatgatttgctttaatgaactcgcatatcaggtatgatattcgcgcatacggaaaatgaagcttgcagactaagatgcatgatgcctttattccttttgctggtgtggaccacaacatacaaagtaccagttaaacattaaatatacaattgccagatatgaaacccatactatcgatgtacctgagtagtgataggccagactttgagcagccatacagccaaacccgctcaatcttcggtagccctctcctcgagcgcctcaacagcattcttcaactcccgaatccgatgtccgacccgccgacgtacttcatccctaacctcctgtgggacctctgccggattagattgggtctcgacagtaggactctcctccgacgtctctgtctcattctcgacttccccaggacgagtaatgtaaaggccgtacacctcggacagctggttgagagcatcgcgggcagattcgcggtctgaagcagcatagatggtagacgagtcagtgctctcggtagcaatttcaaactcgtcttttgcgacttcgtatagctcttgtagttcctcgaccaggatatcggcttcggctttgcctgtggatccttttcggtcggcgtaggtcctcactgtgggtttgacaagcgatgattgaagagaacatgatgattggaatgagcttaggctcagtcgtattttcctagaactggacaggctgtgcaaagaccgaggaacgagatgcagtcgctgtacgaagggtcggttgatgtggtgcgattgtagacctccaaggcgcaggattgaggagccacgcgcagatcgaatgcatagttgggcagacatctcgaaaataggggcgaatgaattaaaaaaaaggtaaggtgtactcggtaaatgattttaagaaaggagctgatcgtaagatcggtgatgacgtcgccagctgtttatcgcatcacgtgccgatacagatctcaggggtggtaataaacataggggattgtgaccgtatgcatgcatcagaccgacgaaggcatcattttattaattttatgagttcattgcgacaattgccttttttttcttggtcttattcctttcttactactatgcctatacgcctacacggagtatgaccaacatagaaatctaaaaagcggaagcatcgtgaacctccctaagcttctgtagagaatcccgatcccgaaattgagaaagaagccgaaaaggttcagcctagtccagttggcaatgaatcttaaacaatcatcacaatcttcgccaatgccccattttcctccatcaaccgatgggcctccacaattttctccatcggaaaggtcttgattggcaagtgaatcttgcctgtcaccagatcccgagcgatctcctcaatgggcgttttcagtactgcctccgtggtactcgtataggtggtcagcttaacagaggtcggtatcgaccccatgggcgtgaactggtcaaaggtccatttgttcccagctatacccgtcatacaaacagtaccaccaggcgccgcacattgcagagagtcgtttagcgtggttaccccaaccagttcaaggattttcccaaacggagcacgtttctggacctcagccaatatcgatcccccgtcgataatgacgtcgtcaataccaagaccacgtaagaactctacgcgtgctggattccgtgttgttacagtgacagagattccatgcaatcgagcgagggccgcagctgccaaccccacgctggtagttccgccgcggaccaacaagcggtcactgggagatagcgcgagactggtgaacagggaaccccaagccgtctgcataagttcaggaagagcgcccaagatatcccaaggcacgggccgatcggggccaaaggcagcggtggcatcgacgcgtcgtacttggtctaccggcacagccgtgtattcggcatatccgccatcgaaggatcggcccatgccgcccattgcagtgacgacgacctcgccagctttgaagcctgaatccagggcctcatcgacgattcctgtagcttcgatgcccagaatacgcgggaatgtcacaccgggtgaatcaccttgacgcgtgaatacttccgatcgattgagcccaaaggacttgatgcgtatgcgcacctctccctctgtgggtgttggcttgggaaccgtttgaagtttcaacacctcagggccacctatattgtgcatcacaatagctcgcatgtcgaaggacgtgtttgcgtcagcggtaggattgatgatatccgtggtgttatggtgtgtcactggtgagagtcaaaggtacgaaacgaggataacagttgcaatcgcagcaagaagaagccaggaagttcacgtctacgagcaaatatcgggacataaacttaccaatacaacatagatagtgatatcacatggcgtcatttactccttccacggaaagcttctttctttatgtaagcaagatcccctcaggtgccgagtgagcgcgatacacgtcgacattcggagtagtcgacgtttggcccggtggaattccgatcacgcaccaatcaccaatcacagcgtctgggttgcagattccagggtgataatgcagtttacttttcagtgaaatgttcatttactagtcggttctgattgaatatatggcctactgagcaagatgaatggcggtcagtggtatttatgcttcagatgtagctgggtcaacgatccggccatatcaagaactcccgtgctggaggtagagtcggagtagaccaataacggaagagcgggccgaccggcccgtgccgccccaattgcggaatgcaagtctcggaggccatgttattccataccggcccttcatcacttatgaatctcattcaaactctcattcaatagagatcgtatgagccacactgctgttggctaggacaggagatacggtcacgcaaccgttttcaatttcttctagcagccttcgaccccaacgcagagagcaacttccattgcgagaaacggattgcgattggtttagctaggttcacggctattcttactgaggttggtgaattttctgggaaagggccaatgcttgctggctaacgagcttcaatgctgtgcagtacggctttttttgtcattccttcaattccaagttgttcttagtggcggtgcctactagatccaacagccctatacttattgattctagatgtggttttgcactttgaaactggagtctgacacagtatggctgaatctgaaggctctgtatagatgtgacgctaatgcttgaagtctatcccacgatccacctatgccatgccgccattcacgcgcagaacctgtcctgagacccagccactagctggggagctgaaaaacgccatgacctccccaatctcctcgggcttagctaagcgtcctagcgggctaagatttttcatggcatttagcaccggttctggcttgcctcgcgtgaataggacggtgtcggtcggacccggggcgacggcgttgatggtgatttctctggggcccagctccttagccagaactcggaccgtctgttcgatggcacctttcgtggtcaagtaaaggagatagggaggcgtgactgtggaggcgtgacaaagagtcgtggaaaccaggatgattcgaccaccgggacggagatgaggcactgctttctacaatcaaccatcagcagcaaagaacttttttttgtatcttctgcaggtgggttgtctgcaatctgcatgtcgtacctgaaccaaaaagtagggtcccttcacattcagatcaatactgtcgttgaagtcttgctccgaggtgtttgccaggtcatggaggggcaaggaaccggcgttggcaatgacaatgtcaatttgaccaaacttctccactgtacgacggatcagctcctcgctgtcgagcacacaactggcatttcccttgatagccagggcgttctgctctccaatttggctcaccacctcctggagcgatactggataaccaccttggcaccatcgcgcgtaagacgaagagctgtcgccttgccaataccattagagccaccggtgattatggcaaccttttcagtgagagcagccataacttcggttgatgatagataggggataacgaattaggacgacaggaaaggtgaacagaaacgacatttcaagtgcttgttttgcgcgagaggagaaataatgcttcatcttgacggtgttacatcatgctgacggtgttggtatacggcgtacatgagtttatcgacggtccatccgcctctgtgaagacgtagagtgatgcaatgagcagcgcagagataacacgcaggagctagtagagatccatcgatctctccactcgaatggaaggaacatccaactgggattcgagtgtgttcaacgcgtcaccgaccggctcttacctcctggcaaagcttcaccaacagatgaagtatccatgccggcgagagcgcgattgagatgctctttgcgtataatcgatttataatagtcagaatcagtgcagacaaatatacccaatcttacgggattactaaaaagagaaagaatcgcgcgccaagcatccaaaattatctgtattgagtcattcttcgaaaatggtctggctaggtaatctattaatttaatctagtatgtagagctaaacatctcggccaagtttgttctttctccaacgcgacttacccttgaaggcctcatcaatctccccaaaggtccgacctttcgtttcatgcatgaagaggacgccaacaatgacggtaataacacagcatccaccgaacagaaagtacacaccgaagctgctcttcgcaaggagaacaggtgtcgtcaaagccaccaagaagttgcacacccagttgctcgaatgagctaatgtggtagctgatgctcgtgttcgctggggctgaatctcggcactatagactttgacggagataccccaggtgacggagtaaagagcggaaaagaggtagatgcagacaatcaccacccagcgaccgacgccagtagatttgtggacggcatttccagcataaagaccgcccatcaagaacatcaagatccccattacaaccccaccgtagataatgctgcttcggcggccccatttatcggcatagattagtcccgggatggtgacagcgaatatcacaagcgctgacacaccagaggccaaaaagcttgcttccgaagaggcaagaccggccttttgaaacaattggggggcatactagagttcaagtcaaccactgtcagttgtatcgaggtatggaaagggtttgagcctacataaaggacaccatcaataccactcagctgctgcatccccatcaaaaagactgcaaggatggtccggcctaaaacgtctttggagaagatggcaagaagcttatccaccgttccctctttgggcttctcgatttcagtttcaacctcctgtgtccgtacttgcagaacgaccttttcgcgctctgcgcgactgacacccaacttgtcccacgcctcttcagccatcgcatagcgaccatgaagtcctagccactgaggcgactctggtaagtaaaggagtgaaagtccacacatgaccatggagaaagctgcaagaaggataaacggcgtgcgccatgccagtgacgagtggaggcttgaggttccataactgatgaagtaccccatgaccaatccgagagtaatggccagttgagggcctgttgtcagtgcgcctctggtgctagttggtgagatttcacaaatcaggacgacaagatttccaaggaaaagtccttctcccaggccctccacgacacggccaacgatgaacatggatagggcaacggctccggcttctattgcggctcccacgccgaagatgaaaacgccgatgcagatccctttcggccgaccaagccgatcggcgacatagccagcgaagaaagacgagagtgctgctggaatcaagatacatgagacgatgaggccgtgaatcgtggagttttgactaccaaatgactttttgaagtccttcatgtcggtcaccgggccgatgataccggtatccatcccgaagaggattccgttcgctgagcatagaatgcatgccagcatatatttcggtggatttctgaactgggaaggaattaatcccattacttcggcttcggcttttggtgtttgacaggctgaagatatttttcggctcgggttgtgggaagtggaaagaagaaacgaaaactcttacccctctagacccccacgtagggcagtcatcattatccattgggtacatcgtataaaatgccgttacatgcatatatcatatccatcattgctcactaggtatctgtcagaattgaccaactgtagggacttgccagtattatatattctgcaaaaaaatgtgtccccagggctagacggagaagctttatccgggattgtatttgagctcttcgctgaatcggcgtgtgagaggccgaagcttttgtgggccatcgcttctatctcggggtatctcctggggttttcccctcgtttctgacgttttatggggcttccggggtacatttcacattaccatccgcttttcgatatacatatgttccctcatcaatgtgatggagagtggtttgttccattctggacactcgaagaatcgagccaatcatcactctctagcctttcaacaaaattattcgtcgaggaatccggcagatcccgattcacctctcgctctctgctgtggcagataatcgctatcttcgcactgctcccgccagagggtcctttcctcagacagattgacggagttcgtgtttcccttcagcgttccattgacatgcttgcgccagatagccttgaaggacggcacatttgctgccgtgacagcgacgttcagctcaactgctgagataatgatcattttgccgaggacatagatgaaatccgggtttactgcgaactcatgaaggatgatgatacgggccttatggggaaggcaaggattttaaagtccatgaggatgcactaatgatggatagattagctacatgctctatttcctgcagtttgaatttccttggagactcgccagtgcaacaggaacgtagtaggttaccgatgttgacaggcacgtaacatctgggtatgctgctgaattccaaaaagctgctaggggaatgtattggaaacaataaagcagccgtatggagatggagaccaagacattcagtacaatggtcccgtagacaccttagatgaaggtagtgttgttgatgagtcggagatagaagaccaagaaccccgtcttgatgcatccaaatatatacgatctccgctgcaaagagaagctgtgaggttagaacgaaaccgacaaagggaaagggtttccaggcatacctgtgtcaaaatcaatatatctttggatcaggtatccacccccatagcgaagaaaagtataaaacagcccttgttgtgctgtgttgtaaacctacacacgctattcgttgtcattcttcatgatacaatggaaactaccatcacgaccatccaccaatgatcctttccaaaagatgataatctagccccgcgaataaatgcgcaagcaagctgagaaggtattgatcgcccacgtatgcccacaaaaggaaggaaatggcgtatgcggctggctgaaacgactcaaacattttcacaacatataccgccagcgcggcatagccggagccctaaacccgttgtagcgtgaaagatcgccggttctgcagcgtccccacagcatctagcctaacagaccaatacttttcctttgttttggaattgacatgtttattcagcccgatggtggatggtggatggtgatggtggggaacacgtattcggtactcagggctcagccagcctccgaacagctggacgtcttatcataaccatatgatacgggcaactgatttcgaaaaaagaggcgtacctgacagtcgccaggtctttctccgaccccttaagagctacattgttctgtctacccctggttaaagaaagcccgaccccagaaatactgaaaaacggaaaggaactccttcaggacggacagccagcgaatttggaaaagatggccgtggcaacgagcctggcggtacttctgagtccagcgcctttacggattgcacctacctttctggtgttgggagccgcatttcaccagttcattcgtccatacgaaattgacaacaatatcttttcccttgcggccttatatctgggaaatatattagccctatgcgctgcctggacttatgcctactctctaagcgtaccacgtgcgatcggatgcacactactggccgcatgctacttcaacgtcggactgacagtcagtatcctggtctatcgagccttcttccaccgcctcagaaaatttccgggtccatggacagccaagttgagtcggctgtcggcagttaatcgggcgatcaaacggacacagcaccaccgggaccttcaagaaatgcacgaaaagtatggcgacttcgttcgcacggggccccgtgagatctcgatcaaccggccatcggccgtggtcgcggtcaatggttcacattcgccctgcacaaaagctccctggtatagccatgtgtccgacgatagttcaaagatctctttgaactcgactcgtgatcccaatatacaccgtcgtaggcggaaggcatgggaccgtggatttagcatgaaaggtatgagtttcaaccgataagtcctctatcttctatcttgtactgtctcaaacgtggtagctgatatacataatagccatatcattgtacgagccgattgttcaaaacaaggttaatgttcttgctactcagatccggtcccgacttaatcaaccgctcgacgccgcacagtggacgatgttccttgcgtttgatgtgatgggtttggttggattttctcaagactttcaccagctggaaaacggcaccgagcagcctgctgtcaaggagctccaccagcaattgttgtatattggcattttgaaacccgcgccgtggattctgaccattcttggaggcatccaagggttagtgggtgactacggtcggttcatgacttactgcgccgacaggattgcggacacgaagaaggtaagttttacccgccacttatatagctgttccgccatggttgctttttccttgtcgggagtgaccttctgacgtacgactacagagatggaactcgagaagcgataaagacagtgaaaaactccccaaggacgtcatctcctggctcctcaaggccattgaggagaaagaccctagcgccccgccaggcgatcaagcgcttaacgaagatggccgtctcatgatcatcgctggaaggtccggcaaccattctccacaacccactgtaaaagaaactaacttatcttcagtgacaccaccggcacaaccctagcccacgccctctactttctggctaagacccctactgcatacaagaaactgcaaaaggaactgtctgacgtctttggaaaagccgcggagccttcgcagtttactaacagcaagcttcagaacctcccttatctcgaagctgtcatcaacgagaccctccgcctcaagcccgctgtgccaagtggtcagcctaggttaaccccacccgaaggtctacagattgacgaggtctggatcccaggtaacacgatcgtcgtgcttccgcagtatgtcctccatcgcgacgagcgctatttcccctccagcttggaattcattcctgagcggtggttggatgagaagaacaacttggtcaagcacgaggaagctttcttcccattccaattaggtcgatacggctgcgtcgggaaacaatttgcgctcatggaacttcgagccgttatcgcacgggtggcatacaatttcgatctcgcgttcgcacctggggagactggagtgtcgtttgacgatgattctaaggatacgttcacttttagtattgggtctttgcctttagttttcaccgagcgatcagaatagaggagtggtattcgacaggccttcttgaaattgagatttttttcattatgttaaaggacaaaggtagcgtcacttagttatcataagcctttgttgttcgaatggtgcgacaatgagatccacgacaatttctttcatatactgtgaacaatggcgtttgtcccagtatttattctttgaatcaaatcgaataagtgccgactcccatatagcataaatactgttaatatccacaagtatctaccaagcaaacatttggattaccttccatttcccccagatgcttcaatcttccctgtaccggatcgtgcgaattttcttagttactcttgacttctggttcaacaccgatctccccgaaagccaagttcaaaggagcgataagccctcccaatcaattccatctgacctgaattcttcatctagtgcccaacaagccgaaaggtcatcttctaatttcgaaatgaaaacctgggaggaaatataccaagaggagtgccttagtttcaaagccagtctggagacccaagctcggattttaagaaacgatccggaaagtcaaggagtggatcgtatcaatgatgttcgcaaagagctaatatcactttcgcaccaggcagagcgaatcaaagaggctgcctttgaaatggtcgacgagaccccggacagtgtatatgtccgcaatgccacccccgagtggctctcctcccgatttggagatccgcagctagaacaggtatgtattagcatggaatacagcttggaccgactggcatttgagcttagatctgatccgtcaatggaccttatggtcgccggacaccttgagcaaatgaccgacgatattgagatggattttctttagataaaaatgcatttattcatttgtggcctctatggatctacaaaattgtaataaacgagaatactcactaatagtcgggcccagtatgcggctgtaggaattaagctgagaagagatgataacttgcaattaggtataacatatgtgcaagtcttgtatctataaataaggaaagcgaaagttgtaaaaagcaattgccattctgctatgatgttcttcttaattttccagtgactttccaagtcctgacccaatccatcattaatgagcgtatacagttcgtgtcgtcatgtcttttctccaagaaagccgatttttcagtccactgtcatttccaccaagtccagcatcaaatcaatcccactctgaatgcaccgaatatgaaatttactcctgctgaccagtgatggccttgatatccttgttctgggccttgttttggtcgttggtggggtagttctggtaagagccgtagttcttgtagtttccgtagctctggtacttgctgttctgggagctgggagtaacctgagcgttgttggcggagttcaggttgttgttatcattgggttcgttgcgtgaggccacggaggggatagaatggcgcttttggtttgcgtgccactggccattggcatcggtccaaccattctggtcattctgaccattttggttgttggcgtgccattgaccatttccgtcagtccagccattctggtcgttctggttgttggcgtgccatttgccgttggcatcagtccagccattttggttgttttgttggccgttctggctgtattgaccgttttggttgttgtcgcgccactggccgtcatgctcaacttggccagtctgattggtttgattgtggcggttatcgccgttgttggcgacgaacacgccatgctgccactggccttttcggtactgtccactcgggtcccattgaccggccacgtcgttggggtccacgggaagtgcgaggacagatagaggggagacagccaaaagaagaaggcttttgatgattgaggagcgcatcttgaaggaaggtgaactagaagagattcaaacgaaatatgaacggtttttgcttcaggggtgctgttgcgatcctaaggttctcgagattgtttgtgttaaatggcgattgaaacccggttagtcgggctgtatttatatctgagaaatttcacctccatgaattatgtagctcaaaagtgctactcaatagctttggaagcctttgacaagaatgtctgaggttggctcacgccattcctcggtgtggtttgatgcgaattggcgctgtaagggacacggggaaacgtgtagttgataaccatgctgccttgcgggggataagcgaacggatgcgcgatgatctcagtcagctgtaaaagatggagtagcacgcggaaagcagagcacaacaataaagattaaacctttgagtggatacatgaagagttgcatgatacctcgcgtgagtctgccaaaaaagaattcgtggatcttgtccgcaagggggtagtaatcacattcctcgacgatcacccgcggtcaaatagtcctcatcctgtctggctagacgaacaaagtacacttacgccatttcaatgcatatgatgttgtcttgtatgtggttgatgatcccttgaggggattgtcatcttaaacatataccacgcattgggactcatgggatggcgaaacttgtgagacatgcagagaacacgttgctttgatcagcaatggctacgacctcgaaggcttcgagttgatgtcagtattgaagctgagcaaagtccgctgcgtgaagttgcggtctggggttggcgtctgctagttacagaagccaaggctgttctattgccccttgaatggaatgatcgaaaatcagttttgcgcagttttgctctgcaacatttagcaaactactcacatcattacaatggactctatcttcgacaagaattgtcatggggactattctaggcgagagtccggtgagggacttctcgcagaggaagaaggcactctctggaatagaaaggaaacaccaacgccaacgtgtaacagcttcgcggtgtgtctgtttcagctgagtgcacttgtgctggtattcttagtcgggactctgttcggctttcactggcgtggtgatttggatggcctttgcagtcgacatgtttctcaatattgtaagagttccaagcttctatggtgcaactcattaatcttattgagatacagcaactgtcatgaaggaagttggaattcaatatagtctgcaagaattcaatggctctctactgaaagagaatgtttttcgacaagatgctggcccagatgttgacgcagcatgggagtcgttgggcgtcaactgtatgtcccaaagtgattaactgctttctggcatgggctaattagaatcatgatctaagaccgcagcattcgagtaccaccagaggatgctgaaaaatctggacttgctaacgaccaagtcaagatcaatgcgaagtatgggggaggatttcctgcgaatgtcgagggcttgcatcaccttcactgtctggtaagtggtctagacctcgacctatgtctgtgaagatgctatactaataccgacaagaatctcctccgtcagtcgctctactataactatgactactaccacgccaagggggaagggcccttcacgaacaatgactatatcctccgccgccacgtgtgtatgttgtgcccattattcctttctcgataagattttgaactaattattctctcatcgcagcacattgcctcgatattgttcggcaagagctcatgtgcacagttgacagcggagtgctgggtcaagtctggatttaccccgagaacccggagccctatgttgacttcaacactcagcatcgatgtaaaaacttcgatgccgttcgtcgctgggccgaggacaaccagcttcctcaggaccccccttcagactttttgcagccgccatcagagggagaccgaatctatatccaaatgccatgagacatgacaagcaatatttgagctagactcagacagtatacaatagaatggaaagaataaacctcagcataggtgataacaccaatagaacaaaaattcgctcaattcaatcaagattataaatactcaagtcatcactcatccccggcaaaacatacacagcattatcctcgcccccaaaaaccttcaaaggcctcactcccctaaactccatcccaatcttctccaaagcgccgcgactccgctgattcgtaggcgagcaaaatccaaacacagcatccaccccaagagacttctttgcatactccaaaagacccttcgccgcctcggtcgcatacccctttcgaccttcttcgggcaacatggcaaacccgatatctggggcaagataatgtgggcctggtggaatgcccctcgtgagcgatacactgccgatcggcttcaccccatcatcggcctgtcgcgagactaggaacatgccatagccatggtaggcgtagtgttccgagactctgccttggaggaatgaatatgccttttccggggtggtgattccagttttgccgcaggagctgatgaaatcgtctgtattccagagttgaactaagaaggcgcagtgggtcgggtcggtggggttgaaggggctgatttggagacgcggggtggaaatcgtgaagcccggtgggaaggagaattcgggcattgtggcttggtagttggattataccagatttgattatagaatgaagtaaagtgtgtattttcttctccttagcacgatagaattaccagtgagtcacagttgaggctggattcaaaggaagcttagcgccgacaggggttgacggcccatttaggtatgtggcgttctggctatgagctagaaagatagagagaagagatagggacaaaaatctgatagacgaggtttaacgacaagaaccttttcgcacattatcctattgtcccatcttcatgccaccgttggcacataccacactgccagtacaccagagagcatcaggcgtacacaacatgccaacaacacccgcaacctcatcagtgaaagccggtcgacgaccacccatcttctcctgaattaactgcttctgctcatcggtcaagcgactcacagtgtccccgtgatccgtcagcttgctcataggcgtgttatcctggtatccttggatatccttccagaactgctctccggccttgaagtacatatcaccgacgaccgggccggggttaaccgcattgacggtcgcacgttcggacagttcacgtgcccaggtgcgagtcatcgcctcaacggctgctttggtaccgccatagatcgactggcctatgaaacccagcgacgaggatacactggagatgctcacgatgcggccgcttcggtcggttgggaggaatggggcgcatgcctgtgtgaggaggagcggggcgaggacattgatcgcgtaatgccagttgaagtgctcggcctcgatgggccccctattggcgtcgttcagggtccggtcttgcgatacgccagcattattgatcaggatgtcgatctggagttttccatcggtgctgaaatgctgctgcgcggtagcgatgattgctttcacggcttcggtaggctggcttaggtcggcttgcaagctctcgcatttgatgttataggttttggctaaaaaggagcacagttcttcggtgtgggcgcgcgaggactccgaagtaaagatcagaagtaatgagcagccctttgcagccaggttacgggcaattgcttcgccaattcctgcgaaggtggcgtgttagcttggtctcttggtatgcgggggagctaggctttaccccgcgatcctccagtgacgatgccgaatttcccttcaagtactcgagccattttggatatcaatgagagatatcaatgagagagatgaagaaataagtaaaacgaatttgattgagggaggacatggccaactctttaacctctcttttcttatttagccgagttaccccatccctccccttcccacggaataaaattgcccgttgcagaatgacggaggaaatgcgtgtaattcgggtaaattcaatgtcggcccgaatggtcgactgtggagtttgttgtttgttatgttggcatggtttgcatcatttgcactgtttggaatataatatcgactccatctttcccttaccactcactcattgctagatttctgaattgaatatactcttttgctttacaagagccggctagtaacaacactgcctttgttgtaagagtatacagtctatctcagtctatctctagtggtcaatcctcccattgacactataaagttacgataggtacattgaggggttaaagcgctagcccgattaggccggttatcgcgatagtcccctgaaatggtgtttgacccggcgctcggtactgtagagcacctcgagtttgtgtttctacatctttcgggggctatccatagtgccctggcagtcctcgaagtcatctaatcatgtcacccttcaccgtgccacccggcgaccagagcgtccaggttcgaatcatcgattctactactaggattggcaaattaccactggcgtttctcatggaacctccaatggaggggatgcattatatgcatccacttccggcctggtcgttcctgatcgagcatccttccggtcaaaagattctctatgatcttggagttccgaaagatttgaactcgtttgcgccggtaatttgtaaacatctcgagacgcagggatgggaagttgatgtcaaggaagaagtgatcgatactctcgataaaaatggtatcgcggcgaatgagatttccgctatcgtctggaggtaagtaccttattcgttgattgataagtatacaaacatcgtaacgtgctgacggtttcgcgggaagtcactggcactgggatcatatcggtgacccatcgcggtttccttcctctaccgatctcatcgtcggccctggtttcaaggctgctttccttcccggttatccagcgaatccaggtgctcctgtacgtgaaagtgactttgcgtaagtcttcgattggcgttgtcatttattagttggtatataattgaacttgccccatccgctaaccttcatcccacgaaagtggacgaaatctacgggaaatagacttctctgactctgtccaagttggccagttccgagctgtggatttcttcagtgatggttcattttatatcatagacagtccgggtcacgcagtcggtcaccttggtgcattggcacgtaccacgactaatcccgatacattcatcttcatgggaggtgacctctgccaccacagtggggaaatcaggccatccaagtatctccccattcctcgtgatattcacccaagcttccctactcccagctcacttccatgtcccgggcacctggtatacgaggagttgctagtccgacggactggatcggtggacaagccattctttcgaccagccatgggaccagatattgaacagacaatagacacaatcgataaagcacaggtggccgatgcagatagcaatatctggtttatttatgctcatgatcgcagcctgttgaaatgtgtggatctgtttcccttgccggctaataattggaaggagaagaattggcgggagaaaacactgtggactttccttgaagagtttggaacggcgatcaagcagatttgaatgacatgaaattgagcatgttgatactcgcatgtaactacatcctattagatcggtgtctcatgccaggagactagaatcaacgtcccctttaatcttaatttacgctttgctgacctgtcgtcacggacaatcttgttcaaaactgtttctaataatacaagcctctagttataaccacgtgcatatctccacaacagatggcgtagtatatatttctgcggagcgcccaagccgcaaactatttcgggccacggagtagactcgtggtgattatgcaggagcaagagccaccggcgctagatccataagcttcattagcaagcaacaaacctgacgcaagccaacgtcaccagtaaggcgcctcgactaagcctgtcgaatcttttactccgtagggctcggacgacctgcataaccacccctcccctcaaccccacaagctcgtgctagcttacggatactagccgccccgctgagttggagccttcagcatgcaggggctctcgtaaaaagcctcgtgatgactgcccttatgactagttgcatcatttccgaccggggtcgacccctgggcgcttccattaaggggctcatgacccagcttttcatgcaaaattagcaatgtcatctgcatatttttggtttgcagcgttatcagctcggccccaaattggaggtcaaggtccatgccgctggtttttatttactgtatattttcaactgtttccctgtctgcacgattatagcgttcccatatcaaaaactcgatgagatagggcaggtgcacagatttccgtggaaattatattctagttacccaggagggagcgcaaacttggacaaaatgtgtttcttcaaactcaatagaacaatgtgattcctatgaaatgtaacgcactcaaatgatatctcgctataggccaaaaacttcccgccggttctgatcaattggacttattccgcttctgtatgcgcctgcttctacgtctcccagtatcttgagtcccttgatcaggaagaaccgatttgttggttaaattatccactgcgggcctggaccttgatatctccggcttgagagttgcggaaacctttcgtcttgctttcttcgggccaacaggagcggccgcccgtttcctcttagtagttctttggccaccgtttgaagcgggaccatctacttgagcggggccatctgctggtgcgggactacctgcttgatcgggaccatctgcttgggtagagaaacgcccatcaaaaagcggaggtctaggttgttgattgaaggtaacatgctcgctaggcactgtcgggctcggactcaaatcgcggtcgttatcgggtatctgcaaagtgatttcatgcttccaaaccatcccaggcaatatgccccattggtcgttccaaatgcctcttttgatccagatacttttcacatgctcgtaagcttcggtgttgatgtttgtcaaggcagagacagaagaagggctatctggggagtcagaggcattttgaactcgttcgcgctccttcgatatttgatagatgaattgatgaaatgggcgtgatggctcgtccccgggcttctgtttggctttccgctcaccgctgtggggtatctttttgtcccaaaatccggccttcgtcggttcctctcccctcgaccgagagagtcggtcgagatcgattttgggcgcaggggtaacctcgggcaactcttcatgcctccacatccaccatggctgaggtacgtgctcccattcttcgttccagattccttgtttcatccagttcttcttgactgtctcatgggcgagattgttcatatttgtcccgtcggggacatccaatgttcggttctcgattccctcgattatgcgagcttccagctcgtagacctgggcgtcaaattgcctattggcgcgtgaagcatcatgggccttcatcaattgccatttctcgcgatcacggcgttctagcctctcgcgtttatacatcgttgaggggctatcggggcttagggatgctgttgaattgtgcgaatggtgggaaatgtatgaaacgtctctgtcgaaacgtgatcgctcaatatcaagtcgcctcgggtttttaacaaggttttcgagcgcggtgtggatagtagttagaccggatctaatgctagtatcggccatactgaggggattggtagaataaaatagaaaagggagtgagagggaaataggagatgggggggatgtgacagaatctagtgtgacgtgagcgctaagctgcagtaactagcgcgggaatcgacctcgctctatattcactgaacaatcatatccaatcatttaccgcccaacattcgacgcctttttactattttcgtacagtatcagtctacttttattcgctgaaacgatcactgaaacgaacagcccccaatattaccagggtatagcggttgggcacacttttgtactcgatgccaaataatacataatgtcttccatcctccttccgagtgtctcttctccgtttgatagttgtcccctgtttgaccttgcttccttgcttcaatatgtcgtcgttcccacaccctcatcgccttgctctcttctccctccggcctctgaacgaacgagccaagaatgtcgccagccatccttggaacaaacacctaacgtcgaagttgaacgatggtacaattgtccttgatattggcttccatattcggtcacggtcccgtcacacaattgcaacactaggacgtggtggagatgcggacctctttatagagggcttcaacatttccaagatccagtgctcttttgaaatcgagccgaacaccaatgtcatcatgctctacgacaggtctcatggccagacaactcaggtttttggtcacaatgctacgccatttgagcacgggcgcgttcgtcaggtagtcgttcagaagaatctgaacgatgttctggggatgggcggcaaaatgcaagatgtctttagattccagttgctttggcatgaaaatacttgtctaacgacggagagaataaaagaactagagtccatcctagatgaccatgtggaaaacccgcgcctggctcggacagttgatgatttggaaacggttttaccgtctcagatgcagaccagaatccacaccgccggccctctacagctgaagatgcgatacacgaagattgaccgactaggatctggacagttcggagttgtatataaggctatcgatgtcgacacgggtaagcttcttgctgttaagatacttcaacagcccgagcaagctttggatgaggagtggagaaagtcattgtattatgcattgaagcgcgaggtcgaggcattgtcccaaattagccacgttagtaagccttccattctcagacactgaaactgaactgacgctgccctagccacatgtcgtcgattttatcacctcgcaaggctgggacggaccggcggcggagatattcatgggtctcaaggacggtgcacttagctccttggttctcaagggtgactttatgtccgtacacgacctcgccaaatgcgtctgccaccagatgctccaggcgctagattgtctagccatcaatggagttgttcaccgagatgtgaaacccgaaaacattctttacactgcactaccgaatgcgcaatatcgattctatcttggtgatttcggtctatgcaaccgcactgttagtgctcatagctctgttgggaccccattatacacggctcccgaggtctgtcaaagtggagcccagacacacaaaatggatgtctggtccctttttgtaacaatcgcatggatactagacttcgatggatttcgccagaacttacagcatatatccctttggcaggcccaacaagctctcctagccataacatcaaagattggagatattcaagagatggcgagagtcgatccgggcgagcgtgcctccgcggcacagatgctggtcaagcgctttggtggagaaggcctttcaactcaacgaaatcaaattccaccactcagtccaacaaaaccggtacccaaacctgaggctgagttaaatgtcaaaaaatatggaccagcccacagttcacgaaaggttccaaaacaactcacaaatctgacccgcgcccgtcagccgagtaatccgcaggctcgagtattgaggccaagaaccatagatcgccttttgacgaagaagcatgggcttctctcccatgttgttgaatcccctgggtttcgtgtgcggcggccatataaacattagagtatgcggcgaagccgggggagcctagggttgtcggtccacttaactatcagaatgcttcttctttatttcttcgatactttcttgcggatactcagttcgcgttttgccgcttcatctgctcattataattacttatgcaatgcactttgtttcttcttaaatttaccactttccttctatcgtagtcctccatacaaagtaaaatatatgctacccgactttccccgatttgacctcaggcacagatattaggtatgcacttcgccgcagaactcagcgcgttagcaacaaccgtcagcgaaaaacacccaaccgtaactgctacgcgaactggcagtagcagatgaactagccaaattgatccgcgggatagattctacatggccagaaatatactcgaaatctggccgtctacaggagcaactacaaaagaaataaatgttgacgcatagcttcgattgttgaagtactacaccgtcgcaatcggcccatggaggcccacacaccagaataaggtatcaagaataaaatccatcacgcagtgttgaatgcaagaccatcccaggtcatcccacgccaaaacaaaaacattagaaacacaccaaccccggtgtaggccactttttatgccgttgaaggacaaccacttttgagttctaagttgatggagaactcatatgccaatcataacatcgtcgaatcatgttgaaagtctatttcccaagagtatcatcgaacgcagttgaaaatgtaaagaaattagtaacggtagatctcgggcttgtaggggccgttgacgtccaagctgaggtagtcggcctggacgggggtcagctcagtgagcttggcgttaacgtgctccaagtggcagcgagcgacctgctcgtcgagctgcttgggcagaacgtagacaccgacgggcttgcggccactggcaccgaactcgatgtacttcttgccgaaggcggtatcctcggccttgaagagggcaatctgggccaagacctggttggagaaagagcaggacatgacgaaggaagagtggccggtagcacagccaaggttgacaagacgaccctcggcgaggagaatgatgttcttgccgttaaggttgtaacggtcaacctggggcttaatgttctggacggactgagcgttggccttcaaccaggcgacgtcaatctcgatatcgaagtgaccaatgtctagatgatagttagtaacgctcataccaacattttggctcagaacaacttactgcagacaatggcgtcgttgcgcatggcctcgaagtgacggccaacaaggatatcacggcaaccagtggtggtgacaaagatctgaccaacaggggcagcagcctccatggtgttaacctcgtaaccctggacggcagcctggagggcgttgatggggtcgacctcagtgacaatgacacgggcacccatggagtggagagcctgggcacaacccttgccgacatcaccgtaaccggcaacgacagcgatcttaccagcgatcatgacatcggtagcacgcttgataccatcaatgagggactcacggcagccgtaaaggttgtcgaacttggacttggtgacacagtcgttcacgttgatggcgggaaccttgagtgtgttgtccttgagcatcttgtacaggtggtggacaccggtggtggtctcctcggagacaccgaagcagtcctcgagcatctcggggtacttagtgtggacgagggaggtgagatcaccaccgtcatcgaggatgaggttgagcttcttgccatccttgaaggcctggagctgctggtccaagcaccactggtactcctcctcggtctcacccttccaggcgaagctgtaaaaaaataatcagacaatagtccacaaaaggcgcaggaggatttgtgaaagaatgtaaacttacacagggacaccaccggcagcaatggcggcagcggcgtgatcctgggtggagaagatgttgcaagaagtccaggtgacctcagcaccgaggtgagtgagggtctcaatgaggacggcggtctgaatggctaaaggagcggtcagcgcaggccttgctttttatgatagatcagatcaacatactcatgtgaagacaaccggcgatacgggcacccttgaggggctggtcggcaccgtacttctcacggatggccatgagaccgggcatctcaatctcggagagctcgatctcgcggcgaccgaacgcggcgagggactaggaaatggtcaatgattgaaggaggaaaaagttaattgagagacatacgaggtcagcgaccttgaacttctgtgcgggagcagccattatgtgatatatgtattcaaaaactgctgattgttagtgagaagatcggaattgcaggcgtaggaattgactgaccaaagggtgtatgaatgagaaaggaagaggaaagagggaaaaggagaatagaggggaaggaaaactctctaagagatccaccaaggtcccggaacgtggcaagtactcactacttacttacggtatgctttaacgtgtatagctaggtaccagatacttctcaactttctttctatctccgtagtgggctgactgatggcggggtgctgcttagtcagaatcgcaggctggacgtggcatctattaaggtcacgtggcgagatcttgtaaacaagctcttcttctacggtggttagctagtgcatcatggtgaggaccacaccttcttatatcgcaaactgcattcctgtttgaatacaccaatttgagtctcaaaacttcatgcaaaatacatgaacaaatatatcggcgtatcctaattaggactagtgcgattgagttacttgggaaacaacttcccaaggttggaaaaggtacctaaactgaacacccccaaggttgcttctcattgtcacatctatgctcccagtcatttttaacatgtcttaaggtccttcccgggtgtaagctacgaagaaatggttggaggctcaaatttaagtgagggccctatcgaagcaatcggattctcgtttcgtatgtgtcaattgttcaacagtcttcgcatttactcttatggctgccgatgtcctcgcaaggtttcatacaacatacctgttctatttcgggtggtggaatcttccgttctaccttgtgggccatcgtcatctgttccatctcggcgcatagatccaacagatgcaatcatggcattgcgaatgtattgcacggctccaatgcctaattccgctccacgatccccatagacgtcctacgaatcgtcaaaggtcttatcatctactagacttgatggtagctggagcccggaagacttcgggccaaagtacgtagggtgagagtccctctcgcttaggagcgagctcggcgcactcaatccaaatgaatctgatctttctgccaacgaggtcaaaggatcgattctttcatttcttgtggttctcggggtgtcttaggggctcttagggctgagaggtggaggacactggttggtagtgactgcgaactatagctagtggtctagtaactactaataactactaatcgaattaggtagacagcagcaaatattgcacaggttcattcactactagaaatttgcattactgacagacatatccttttatcatgtacaggatatgctaagtgatatgctaagtgttgaaaggactgtggagttggcgtaacataaccctcaccatatccatcgtgtttctcgtgtccatagaacgctgcaaaaacaagcaaattgcaagaatcataagaattcgtcaacggaaccgaaaagcaaaaagcgaaagcgaaagcgaaagcgaaatcgaaatcgaaatcgaataaacatggtctcgtaagtcatgaaaagcgcgaaaatcagatggctcgcacgtaaaacaatctagtaagatatctgcggtgcctcatgaacgcggtaaggatttccatcacggtaaagaggggtatggtcgttccgggaatcggccgtcgaaggggcatattcgatctcatcaggccagcgatgatggcgagagggtgggccctggctgtgagcgcggcgacgctcccgcttaatcgcacgttcggcgcattcctcctggaaatgggtgttttctttgcgcttttccatgagttccttccattcaccataggcacccttgatacccagtgcagcgagaccaatactcagggcgtccttggcgttagcggtcatgcggcgtttgcgggcctcctcgggcgtgatctctccctcctgtaactgcttcagtcgctccttccttttctcaatgctagtgtagacactgtgcgcagcgtggatggtggccacactggccaggcctcccgtcaccaacatatcccgcttcagcttcttccgttgcttcttctcatcagaactgtcacctaggtcagaatcactctcggagctggagctattgccgcggtccttagaaccggcaccgcgcgaagcactggtgcgtgcacatgggggtggatttcttccgtccgatgaacggtaccgacctacatctctcgagcctttgccccgtctcgagtccctgttgtaataatcgctttccgcatctgaatccgaataatcgtcgtcccgatgtccccggcgatgacgccgctctcggtcgtcccgatgctcccgacgatgctcccgatgctctttacgatcgtctccgctatcgcggcgacgttcttcttgctctccgccgagtcccagggccgccatgccctgaccgatgtagtccgaaacactcttgctgcgcttgtgggaaccacggtcgtcctcatcactgccacgagaatcactacggccgcgatgccgagaacgtgatttcgagtgtgattttgagtatcgatcatagatttcctttccggcagcagcaagggctccagtggcagcgaggttcttgagaccaccacctgaagagtgatcccgaccacgagatcgtgagcgcgaccgtgaaccgccaccgacaaagtgactggcagccagacctgcaagcgtggactcgagaacatgacgtgttccatgcttgctggggtctctgtcgacaaggccgtcggttccagcagcagccacagcggcagtgaggacgcgctttcctttcgcaccggcccattcgccaggctctttgcgttgtttgaaagcctcaactgcaccagctgtcaaagcggcgcgagcagcctgagcgatgcgctgcgtgcttttatcgcgtttgctgctgccgccacgatggcgactgcgtgaatctgacggtgaccttgagtacgatcgatggtgatggcgggactgggaacggctgcgaccacggtcgccgcggctggaagaagcagcggcacccccgaggcctatggcacccagggcttgatcgctgaacgacttgcgacgtctgttgcggggtggagagcgacttggcgaagaagaatcagaatcatatctggagcgacgggagcctgagatatattagaattgatctcaacgaaatctgctctatattactcacgttcatcctcgtagtgtcttgggcgacgaggaccagagcttcggtagggagcatcgtaagcgccgactgaggaggcacggcgcacattttcgtagacaggtcgtctcgaccgccgagagtcataagaccgctcgtaggtatagtccgagcctggcggatagtcgcgctgtatctcctcgaccgagtcgttgctggcacgaggcacatatgagtctcgctcgtgtcttctataatggccgcgaggttcatcatatggatcggcgtaactggtggggcgtgcgtagcggtcgcgataacggtcctcgtagtacgccatggttgaggcgaaagtgaggacacaaattgaaagataaagtcgatatttgtgaactactaccgtccacggggaaaataggtgggatggaaaaagaagttcgtgaggggagatgtatagcggggctggggtggcgtgacgatgtgggttcagatgggcgagcgaagtatcgtatctggggctaagagacttggcagtggctgagagagatagccctggagtattctagaggtgatacttggatgaaaagtacaaagttcaagggacaattctttttaaaacggtatatatagcaaaatcaggattgcgccaatgacgtacaaaggaacagcgaagcattcttcaaagcggatataacgccatccaatatcgaatgagcatctggactggcgttgtgtatcagagatcagataggactccgacgtcatcctgcgtcccaggacggtctagccctatataatatacacaaaggcagacaattggataatgcttaactgcttaatctactttcaaagagatgtacacccttggaagtatacagtacatctgagatgcaatatcaaatatcggagattaagatttatggaacgtaaacaatggttccacgggtcgccttcgggggtcccagccgcttacgatctggccaacacgacgccctggatctcgttgggtgcagaactggttgcacaacatttctcatgggaatccctgaagggaagctggacagtatttggctctctaacacatcgccgcccacaatttcaaccatcacacataacacgagaatcagcacatggtacatgagggatataaaacagggaaataataacacatagtaacacgtatgatagacctagacgtcacaatgatatgaaacgcgcagtcatgcagaatcgctgaatatgaaatacaaaaacacaaaagcacatccgagagcccaaaattgaccaaaagaaaagactaaatagacatgatcgaatcacaccgcacagcagtggccaggcacaaaagacccaacagaaggagaaagtcgtatactaaacagcaaatagaatggacggtcggcgaaaaccgacctgctttcttagggcgcctggggaccaggcactgggacagaccctgggaccggccgtgcacctgcctcgataggttgactgacattgcgctggtgcgagacggaggcgtataccgcgtcaggacgagccatcgcccaccgagcatcaggctccgactcggaaatagagcgcatctcgtccgagtgcgagcgatgggtccggatgtgctgtttcatgttgtctttcctcgtaaaggctttgttgcagatcggacagtgcacgctcttttcgccggtgtgctttttgccgtggcgcgcagcatggcccgaagtcgtaaatgtggaagagcacccatggctcgcggcataggggcacgggtacttgttctttcgccccgtgccgcgcgtcgctccggtctgagaagccgtttcggatgtggttgaacgagtctcgggtgatgttcggggagctgctggcccgcgagctgggaatcggtatggttcccgtcgcggatcctgccgggcatacgggtggtaagatgatggttgactggtgagatagtcgtaagctgagccatcggacgacccgggcgaagcgggctgggcgacgtccgtcaccgcgtctgaatgatgcctgctccctcgtggtgatgttgctggagattgggatgaagctgcagggcgggtatactgtgggtcgctgataggagagggtggtcgctctgaatgtggatattgtgatgatgatatgtgagtccgactaagtcggggcgcggaacggaccgcaaaagatgggttatcatcattattcagaatggacacaatactcgtcctacaagtggacatctcctcaatgccaatgccccgatatgcggtcaccgaggctgggaaattatactagagacaaaatgaagttagtttagactgttggcaaccggctcagccgggctctgggaactcgcaagaactcgagagatcgccggtctgagacaaggggagaaagggaagagggtgtagaagaagagaaagaatatctctctcatttcttgcccccccggaggacccgacaaacgcaccagcggctctcgaaatatgtttgtcctctgtgtcgtgtaacacgtcgacaacattagaccttaaatgggcactcgcctgcagacctgaacggaggcttgagcttgtgccgggctccgtgtcttttggaggcacgggtgacgagaaagtatctcaaaggttgttgaatgccggagatatgacgacttggcagcgatagtgcaaggtgaaatgcgatagacgtctttccctcgctgtagaacttgttcaaaggctctggtcctcttttttcgccttttcttcctaggatttcctttttttcctttctaatttctgcaattgtatgtggggaacacaatcctcaacggcagttgcaaaccggcctggggatgttgcagaaaagtcgaagttcaacgccggttgtctaacccaagtcacagttcttccagatgttaggccgtctgggaataagtagaaacgaaatgcgctctgcgcgtgcccgtgatagaggtagtggaaatgagtagtcggatacgagataagaggggattgaaatgatgagaagtcgaaacgagataagagttcaaataggaatatagatcgagtagagagaggaaaaaagtgaagagcagccaaccatggccatcggtaactaattatactaaaaaatgagcgaaagaagccaagctccagggtctgtcgaggctccccagagaggatacacttacggagcacgctatttagttcggtggagcccttcaaaaagaaaaaagaattaatagcgataatataaaatgctaaaaacaaatatctacaatacaacaacaatacagaccaagacccctaatccacacccttgtacccgttttcttctccgtttcttccggcccgcccgctaactactccagtgaggtctgtgacatttttccatttttatctgattcttggacttgcgttgctttttttcccttacgtctaaatataatactgtatgtgcagttgggagtgttaactccgactggcttatcatgcggactagggcttcggctgggccaagcgaaaacagggagagatccaccatatcggcagaaccgcgggcaatcatgagaccattggaccctgagcaggttaatgactatctttgcggatttatggatttagttttattcttggcttgagggagataaatcagaaacggacaagcttttagccctgtctatacgtattcgtcctccgcgctatagctcttagactacatttctctctggggaaaggctcagaacatacgtaagtgatgatgttagtaccttggcctgtttgggaactcacctccggcttgggattccatagcgggtattaggttcaattcgggaaatcctgcgttgattggtggctttaggttcttacttttcccaaaattatatctttgttttattccgttttccttcttttgctattactgcagggcgatctcgccttacggtaaaagtaaaaaaaaaagtaaaaaagataaggcataaaaggtctagccctgagatctccaacgcttccaaggttcaggtttcaacgctttgataatccattaatcataacgtggctcccttgcttgtcggactttcgctttcttgaaagagtactttgcaccgagatttcttctttttccccgagataacccctcgtaaaaagttacgtggacgatggaggtatacacgaggattgcctccacatgagtaaagataccctagtgaactattcaaccgaacctagatcttctgtcacgtctgctttgaacattccaaatgatttacatgggagcccagggggtgaaagggactggcccgtgcaactattcgtattcgtgttcatccgccccgctccgagaatccattcgcggggactctctccagggctgactttccctctacgttgtagcacacgtactccgtaagtcggtatataatgaaacagactgctttcagaggttaaaggggagtgacatgtttagcagagatagagcgacagatctgatattgtaatgacattatcaaccgtgtaccgagaatactctatgtcatatcaattccatttccattcatttccctcgtttctcccgcaaatacctcgtggcaacgccgatcaagccaagcttcaatcttccgatctactggaactagcgtcagaattatgttgtccaaaattcgtggctggaggacgcggaccgttttggggctttctcagccgagaggtgatttgcctatactcgatctcggacggggccatacgtatgcagcctacgtatatccacggtagacgtatatccggtagttcgggatgtctagtgcagcaaatgcgcttccgtgcttgtttcgactaaggatttagtgttcggatttagtgttcgagacacttctcactcgccgagcttacgccacaggcttgattcgtcagggcccttgtactcgtcttgtttcgaggtgcctggaaagaccctgttttttattttcccttgtttgactaggatgcagggcctcgtggcccgcttactacgatgagactagtctggcgtggaccagtagcatagcgggtgctatcatcaccgttcccgcttagcggcatgggataccctaattgtgctaactacaaccgccactttttttggcccacgcggcctttttatatgcttacgtgtttcaacccttaacccttgagctagttagttagggcgtacggagtacggtgtgcgaagtatagaggcgcagaaaatttcacttgaaccccgacaccggagattttatatccgaatgtccgaccaaaaagaatttgatctccactcggtttccaccatctttcccatcttcgaatcagaagggcattttcagctgccgcccgtccaatttgctgcctgatgtccagattacagtcggtaagcatgtgtaagcatatgtaagccaggtaatgttcacaagtcaccggcatttatgcttaactccatagagacgatccggcagatgccttcccggccatctcccagcgtggagcctttcgcttccacactcgtgttcggatgctttcgcgctattgatcttgtggtctatttcgaggatctggagccacttctgggtaattatggacctgtgctgagtcatttatctaggattctagttcctgggcatgctcaacatatgaacaggttcctggacccctgcttacaaagcggaggaaaatcgcccgggctatcatccgtatgtgactgtgggtatggacttgccatacataactcagggctaactacggagttccattctccaaaatggatcaaccggtcccttgcaatggtctgagcgcccacgtatgataaccccaggtatcgcagtttaggctactgtcaaacctgggaaatccattgaatattcactttgcctcggggagctctgttcttgcccgtcccagtaaggagacacacattctaattcctaacatatgttttgtcgtattccgagacatttgataattacatctcaagtcaaccaaactgtatatcgaacgactcatcagatctcgcgtagtatccgtcatctctcaacaattccctcctattccccagttatctaagtttatgtgcccaccttgaattcgcgcacccaattgtatttagtggattgttgtaattgacattcgtactagtaaacaggaaaacacaataactagcccaccttctcaaaataaacatgctatcaatatccggccacgcggaataggcataatcataacctccattatcatgcgccaccttgccaataaataagggttcggccggatctggtcattggaggtggagccgaggacgtataaaaatggatgacgagagcgtacaacgtactctaatctaagtgcacgcggtgatatgtggctgagagaggcgcagttcatacctgacgcgaacacctgggtaatccacgacaacgactttagtacagcgatgcagagagatccggtcttgataagattgatttaccttgattttttgcttgttttccgtcccttattggctgccaagcagccattgagccttagcgtctctacgtatggtgtactatgaatgaagctgcgtcagcagaaacgtcattttggtgggctatctatgctccatactggtgtcgcgcgcatcaagggaaattacttcgaacagaggttagcccctgcatatttgggtggggagatatggcggctacctagagatggtggtgggagtctcggggagttttcggggattcgccgagcggagagggacgaatacggaatgggggtcgtattgcgtggaagaggggttatattgttggttatcttaattatagatgttcgtggaattcctaacaccgttctttctatgatgttagacgttggttctacacctaatattatgattgctggactattgactgtcagtgtgccggtatcgatacaaccacgggtctcttgcgaacaccccttaaactgaaacgtagatgagacagctaggcttggaaagctaataaggtgagacatctggttacaagctaacggcttcggtgcagtctaaggaataccatgccccgcgagattgactcttgtttcatcattcccacttcccctctgatcttgatgtggttaaccagcagaatacaatcgagttgagttcttcaaacgcaggtaataggtatagccctcaaataatttggacacacattaagtaatagaaccatgctgacattcatttatcaatctcagactgaacagacaagtttctacgtccagtccctcctctccaaatcatgcagtaccttgatcgtaactcttcataaccacctacctatgttctggacgctataccatgcaatcagccaaagctaatcgtctagcctgcctttccctctatttctcctcttcgtcctttatcccatacccgagaaggaagcaagtccacccttctctccaaggccgagacccgcacgcatgtcatccgacctcgaaatgaaagcgaagccgttcggtgcgacacacgggcaccagcacccgggtcctgcgtgtgacgagtggccacgcaacgtacagcaaacacaatgcggggtttgtcaagagacaggactttgtgtgatgtgacatatcctgaggctcgagggccaaaaagggtcatgcgaaggtccggcagaatggaatcgcgcatctagactactggatggctttcttctggtggaaggggaacaggaaggcttgcatcgctctcggagtagcaatcggcatcgcgggagagacagattccgctagacctgcgaatgccgacggcgaccaattcttctatgccagagctcgaggcgtttggaactctgtcttgcttggcttggattcctcgcggaccagtcttttgctcgcggaccagtcttttgcgtcgcgttgtcaagtgctgcgtggcatgatacaatgaagaagataggaaatgcgatgcaaggcaatgaattcaaagtcaggacaagtacggagtgcaaaaagggaaaggtaacccttgactttggcgttattagcaccacactctaagcaaccgagttatagaacccggttgttccttccaaggttggcaactatttggctttatcaggaaagtacaaggttagggctgaactttacaaaaaaggaaagcgcgtttcacatcgtttctctacctatacctacacatggataacagggaccaggggttgctcgattaacgaggcaccttgggctgtttccatcttctgtcctccataccaattacaattcctcatctgtcataccttcactatcatgaaactcgtcaaaccacccgattggttctagttctatcacatatataacatatgcatggtcctgaagagataaccccatagcattatctccactatacgaagctacagccattatattttccaagatccaaaagttgactgaaccctagtggtgtaattatgacaccactcgctagggtccaattgaggctctgttcaagtttcatgcctttacccacaccatctgacacagcttccaataagtgattgaccgccgataaacagtacatgaataatatatttagaatatggtcgacaacatgcctggccgatctgagattcgatttaccgattcgatttccagcgctgttcatgcaatagcaaactaaaaacggactcagaccagtggagtcaatttcagggaagctttcggccggctatccagagttggaaaattcgccgatgaaggatgggggcggaaatgttttcccttgctcctcagcctatgagtcgagttcttggtttcttcattcaccatcgacactgtccgagaatcattgaaattcagccgcaatcagatttccttgttctactctcggcatccaaacacctggaagtctctgatcaacaaaatgaatcgcatcgctttcagaacccatgttgtgggtagcgattgcggagataatgcggagcactaggggctccattcgagggtgggtttgcaagtcttagggtcgaggctatttgtagcgaatcgggctctcaaccagaccgcatcgggtcatcctcacagggcatacaaattccacggacctagacagcttaaaagcgctaggattcatcgtctcattggcctatgcagcgacgcgcttgttaatcttacttttgtggaagacctggtccaacagtcttcaaacgagacattaagaacggggctgcttactatcctcgttccgaactctcccgccgtttcactgtgattcgctccgtctaggctgtgcaggggactgtatcggcccatatataggcgctgtatagtaagtacaatatatagtgcggttaacaggcgcatcgcaacaatctcttgaatagcctcatgtcagagtctagaatcgtctaaaaataaccaagtaccctgataaacaagatctcagtacgcttctcgcttaaaatgcaattaagcccccaaataagcaaaagcgcagaccgacatgccaagcagctaaccagtttacgatagggctaggaagaacagtacactgcccaagtggacccctctatttcagccccatgaccccttttccctatttttatctgtaggatgttcttgctttaagacggttgtcgttcttttttgttttccgtgtctgtacggagtgcaagttccacgatggcttcgtcgtgggagtcgcaacactcgctgctatccgaagattcgatcgacgctcgaccccagcgttcttggaatccactcaacaaccgccgcactgactcggagtatcgctaccatccgccctcagaaaccacatggtctgaagaagtcctgcacgagattgggctaggcatctcgtccgccgacgccattccaatagaacttccgggagacaatcgccattcaaccgatagcgctgcgactacaactccatatacctacaagatcccgcaattttcccagactccgactccgcagactccacatgcccactcccacgtgcggtgccctaatcgaggaacggtcctccaaaaacggctctcctgggtcccattgacagtcttggttctcgctgtctatgccaccgtcttttcaggtatctttctcggcattgcgctgcgtaagccccgatggcgcaatgtgtccggcgatggaccagtggctccatctacagcaaccttgttgagctcggcttttgcaaagacgatcgaattgtcttatgttacgatttgcgtcgctttcctaggccaggtgcttagtcggagggctttgatgagggattctcgaggaatcagtatctcggatatgaatatgagggcctggattatgcaacccggatctatgattgtgcattgggaggcgctgcgatattcggcgctcactttccttggggcgattgcactggtttcgacgttcgtggcgatgctatataccaccgcggcgcaagctttgggtaaattattcctcttccacaacttatgtcaaagactaatcaacgacagttgctccaaagctcactcttggtcctatcgagccaaggttactcgagggcaaggtaacctccagcttcgcgaacccaaaatacatcgcatcggactgcgcgacacccgtgaccaacgaaatggacccggagtatcgcaacacaacctgcattcagattgaacatgtcggccacgcatatcacaactaccagcaatggataacccaatggagcgaggtagtaagcagccacaatgatacctcaaaccaactgcgaaagcgcccacagccgacaggctcactatgggacaacaccacaataacaggcagctggattgatatccaagatatgtccgctctgtccaagaaacacggccgaatggtcaacaacataacaatggcaatgccgcatggcggcatccccgccgcagcaatgaactccaaaaacaaactcaaacaacccacagacacctccggtgaaggcaaatacaacatcgaagcctccgtcccctcgccagccattaatgtcctctgcacaggaatgacgaaagacgagctcaaacccctagtctactccacctggcccggcggtcacaaattcaacatgacgacgtggagtacctcacccccagacgacatccctcgagccccatcctggctgaaccgcacagtcgtcgactcgctcttccaattcggcccgaaatacggccaagtcccacccgtcttcggcaaatacccactcccatacaacacgatcctcaacacaacaggaccctggcccgcaaacgccatctacctcctcggcgcgacgccgccatccaacgacagccacatgcccgagtacgtgatgtgctctatgcgcgggaagcaaaccggcgtgtgctcgaccaagtactccgccgacacaagcggcgccttcctcggcacaaactgcgagagcgcctccaacgacctccaatacgaccgccgccaagacgtgttctacgagggcgagtggaacccagactggaagaacatcgcagcggagtgggcgagcgcgctcagtctgaattcgggtatttcagacggcgcggccagcaacgccagactgctgatgcagatgatgccacaatataacaagaaagaagggactttcgcgctggacccgactctgccgtctatcggcgaggggctggcggtcatggccgggagcacgcttattctcagctcgcagaacgcgccgttcgtgccgttttggaattacagcattgagaataataatgtgcttcccgagcctgtttaccaggtctttaatgcttccatccaggcgtttgggtatgcttccggtcccacggagaagtggcaggggattttctacgtgattcttgtgtttgcgttcctgaccagcgccatctgtcttgggtttatgattttcgaggcgcgcgggcggcaggtgactgatttcacggagccgcagaatctgttcgcgcttgcggtgaatagtccgcagacgacgcagttgaagggtgcttgtgggtgtgggccttatggggaccagttgaaggagaggtggtttattgggatggaggaggatgatgagcattattatattcgaagtaaggcggaggagaagattccgttcgtgcataagtcgatggactcgacgcatttggagccgatggagattgatgatgggggtgggaggatgctcagccctatggtcaatgagtttaggaaggtctcgaagcgccattcgtttttggcgaggctctattgaagagattcctagtacatctccatttggcggttggatgcttatgatccatcactgatttacgataatggttgaatgtaaggagtaatgcatatgacgacagggcatttcaatagcatggctggagcatgcgcttgatttcaataagtgattaacactaagatcgagatatgtacaaaataacatgaacacaacacccatacaagaactagaccggcacagtaccggcatagccctcgaagtcaaaaaaaaaaaaaccggttcaacaggtgtggcacaacgctcgggaatcgctcatacacacaaacaaaaaacgaggaagatgctggatacagataaaaatgcagcatgtcaaatgcaaggacaaaaaacaatgggctttttcaagacaccagtagccacgtagacgccatgaaaggaatgaatgagggagataaagagattcgccaaatgacctagcgaggtgaggtattttctgaggaaagagagtgagagtatgggagagttgggctccaaatagactctgagtcggaataggcgaccgtgtattcaacgatcagccttgagattgagccagctcatatctgaattggtattgttcttcggcccttccatcggaagttcatcgatatcgtgtggtatgatgacgctggatcgtcgtgcattggactgccttgccttttccgcgacgctggcattcgatgattcccagggcaaatcttgcgtgctcgattggtagaagctggtagtgtagttgctgcttgtgggacgtccaagccagctgttctggcccgcaccttgccactttggatcatcgcggtcgtcgtggtcgtcgtccgaggtgacactgattgaatctgcgctggagatgcgtgccgattggctctcgggaatcaccaggcttcgactgcccgtctcagatgggccattttccgtggtcggactgccgctgaaaacctggccgaggggcttgggctcgtcgaggaagccaaaattcaatggtgtcaacgtggtcatcggccaggcgcttccgcggtaatcggacttggtgtatccggagctgatagtcgagcggttggattggtagttggtggcaccgccgtcctcgaaatacttcccccacccttcatcagtcaatcggtcagcggcttggtttccacgcccggtgtcatcgccgacgttgccgtcgtcggtgtatatggttggtgggcccatagcaccgctggagggaattgtagagagtggactgctggtcttgggctgaggagacaatccatagcccgtattcgtcggtggcttgagggatttctctccgtagttgccggacatgatagccaatgagtcgaccgaagcagcggctagtgggacaggagatcttgccatggggtaagcgccttcggtcaggggttctatgccttgatcctggaagcttaggcgatctttattatcgccaccaccaccgcggccgcgaccgggttgggcaagctgcttgtctttcttgcgtcgcagtatgaaaagaatcataagcagtatcaaaccaaatcctaggatactcccaagagttgcgccaagaatcaccttgtcatgttcagtcagggtgccacttacagccgcagctgatgttgatgaggcgggcgtagttgaggtcgcggttgctgtggatgacgaagttgatatcgaagtagacgtggtggatggtttgaggacatcttgatctcctgttccataaaacagctcggtagagttgacccatgcgttcgaagtctggttgaagattgccaatgattcattacttttgccgctggcgagaacgacaaggccattactaccctgggcgagcgtataatcagaccaggatactgtcggggcgaatgtgctgttataaggatcggtgagacccctcttttccgatgatccgatgactgtaaccgggttctgcgcctttcccttcgagctgagaaggtagctagtggcactatttggggaagcaaccatcttgaactcctcgaggaccttggtcccggagtcggaagcgagcgcgcatagcgatgaggatgcgattggattggggagagtcgtattggagatggcccagccttgcttatctgcagcctcgtagatgaagatactaggattggtggcagagcctccaaccaaggctacctctgaagaactccaaggcaaaatgatgggctcatataatgccggcgtgccttggtcgaccgtggaactcacctcaaaggtagacgagtttgttgaaatgaggtatgtcgactgagaaacctgggtgctaccgtctgtgtttcctgcgtaaaccagtatttgcgaggtcgaggatatgtatccaacgccatgtccaatccgatctttcatctccgttgatggtaatgtctcccactttcctgtactgaacaagaagcgttggaggccgctactgccggaggagccggtcccgccgaccaggtaaaatgctttcttgtcttcgtcattttcgatgttgtcaattccaccctggacgcaggcagggccagtaaccatatgctccggtgacgggagctttttccatcccttattcttttcgaggggtatttttgcaaagccagtcggcgaatagacgtagaaagtattgttgtggatagtggagcaatcgccctggatcttgattaggggttcgggtccagtcatgctgaatggtccaaatttgattgttcaaagtcgcaacagattctggaccagtaatgaaggtaggtggccagccagaaaaggacttgaactatccaaattagagaagtaaaaggtgactaccagagcactatctcatctcgaccgccgaggcaagtgagtgaacaaaggcaacagaccacactcgatttgagctagttgacgcgacaacaggcaacgtgaacacaggtttctcggctgttttccgcgcggttaactgcgctttcaagttctccggatgaacctcaggtggatcgcgtatcggatgacgcggcgactcgggatggcacaatcagggtagtggttcaggttgtcaacaatgagaatcacaacaccaacgcgtcggtcaaagagaacatcgagtaatcacaaaagtatgtggggctgggcgatctagtcgaaaggtagaaaacgaaggaagggccaacaaaacccgattaagcgaatgaggggtggttggcaaaaaagaacgaatgctagaatatcaaggtgcgcagcacgagggtaaactcagagaaggggaggtaaaaggagaggcagaacagagacagaaaccacacgatctaagtgaaacagggaggagggcccctcaaccccctaacggaggaggttagcagacgggttagggggggttagcgaacaacgccatcccttaaggggaataatatcgtcattttcaattcgtcaggtaactttcccgttaatttggtttttttcactttaattgggtctgatactcattcttattactttattcgctctgattggttcgtttcgccctcattgctcctcttctatattgatcaggggggttcccgacaaagtgggacacctctcgttgtacctggacccccgttttacagcttggctttgacttcctagatttccaattcttctagggcgaatctcgggatatacaacagcaagggagactgcggatgtaacacatagcaatattctgcacataataacagaatcgaaataaaataaatcagttaaaacaaaacaaaacaaaataaaaataaacaaccgctcttctgaaccttggtattccctcaagagaccgtggttcctgtccgttggatccatggaaatttcaaaactgtggcgccttggcgtcccacctccaaggttcttcctctataattccactttcctatacaatgctgtacaaagtataggacactctaagcctcaatatcaaatgttgcctcaaggtatccattccacatctgactcagggattatcaaaatcagcgatgccctgttttgtaaaccggaagagctctaggatttctaatttcactcacaagtgtacagcatatagaccaattttcaattcatacgattaacgaatattaactcatcctcatgtccctagaatctcggctttctgcaatcattccacgccccttttgtacccaagtccaaagatcaactattacgcacgagcatgtgctaattgtgccgtagaaattcttcctgccaatttcgtaaatgtgatcgacaggctgatcagaaatatggcaccccactatttaaaagagggtgctagttagggtctaggcctaacgttgacatcgatccgagcgagcacttactgttcttggtaggattggaaggtaggtagttgtatgaaagtgacgctgacctatgcagtctcaatggctgtaatcgagactatgaaaattgtatagaaatcagaacaatgtgaacggtaagttcatcaactgaaagcgagaaggatgtgtggcgcgtcactgctctcgttgttgatagctcatcagggtcgaacattagttagtaccttgatggtagttgtatgtctaactgactcaagttactatccccgaaagaagttgttcgagtcgccttcgttctatggctatgatcctcaatgaacgtagttgtattgttatcaccattattttcaaagactacgagaatatccatatttacttcaggtcttagcgtctgcaatatatattttctgttcgatgtcccgttttgtgcgcaaatcattctatatatagacgtctccgctggagtacaggtagtctggctcaaagatggacacgcataaaagattttccaatgtgcatttaccttgaaaccatcagccacagacaaattaaacacttgatgcgtctgaaagtggcgtttctggcaagagtttaaatgaagtctctacaacatatcacatgttctaatcggggcatgcgattatcgactatagatagccgccaataggcacaacggatcatctaacaataacggatcgctcatgatcgacaagttagctgtcgatctctcctacgaaggatcaatatgcccatcgtggtcgatgtttcgagtgtcattactcatttaataggacttcgttaacattgagctatatatatatccgatgtcactacttgagatgtcgatcgagcgaccctttacctatgtacatggtagtaaaaatcaaattatctgaaacaaaaaacagactatgttctatataggaatggattgttcaagaacgtgctatatatgttgtaggatagagtgaaaggaaggatttcgggagtgagggataagatatggagcatgcatggggctgtggagctgtggagctgatatgcatgtactccggatgtttcgggaaaatgtctcagttctccgtgttttgatgatacagattaggcattaatgtggatagaactacggagtatccaagagctgtatgtacacatctactcttatctcatgatctgctttgtgagctgttctagtatcaatggcggatgacttcctgtttagattctgaaaagccttccgatctctaattcagccgacgcaggtaccattacagagatgtaccacaaagccagccccgccctctggaggatttgatatggccagcatgcacgacatccataccgcatacttgtctaaatgtaggggacagctaatttggaccctacatatcgattcgtgccgcttagccggcgaaaccgattcgatcgaatgagacagtgtggttcggtttcattgtcacacgcagatatcgaaaatggtattctggtctgtattatagcacatgaagtccgtcctcggagtgggcttggatggatattttcatgatataaagatccaaggtgtcaaagcaggggcaaatatgggaatcaattgattttgtaaaatgaaagctaccacgcgcttcaagactggttctgctgcttccattggtgtgccttttggagcagacgagaaagattggccgcagattgatcgtctgcagggaagacatggtctgtgtactcctcgtactggtcgtccgccaacttgcggcgcttcttgacaagtcggggcatctgtttatcgatcttttcaatatcctcgcgcgatccaaccgcatgctcgaattcttgccagttgttgagaatatccacacgctgtacacatgttagaataagccgaacaccgtgtaaattatgggaatagcaacttacagaatccgtgagacccttttctttgagcaccttgtgtgcccgagcaaagactgcacgcgcgcgggcctttgcgtcttcggtaatacctccctcctcttcttcgtcctcttcctcgcccggcacagaggcttcgaagcggctgtagttgacccataccttgacgtgatcggttttctgaaggagacgttcgtacaattgtcgaactcggtcatactcgccttcttcatcttcaaagtcaatgtatgccttccacacaagctcgggcatgtcaagggtcggttgctcgatgccaagctcgaaaatggcccttgtccgttccgcgtcgtccagatcatgctccagcttcgcgaaatgcatccacgactggctgttggaggggtcccattcaatttgcttctggaacaaagtgcggcaccgcgcgaactcgaacaaccggcgttcgatgctgatatagccacggaaaattttgtctttcggacacattccaatagcttgacccaatgtcttccgtgctgcttgtagttgcatctggcgaacttcaaactgtgccttcaagagccagactttgccgaatgtgaacttcttgtgcgggattatcctcagacattcctgatagatttgtccagcgcgttccatgtccttcgcttccatttcttcccacacggcgtagaagatccatagatagatgtaccggcgccaatgtcttttctcttgtgatgggggaatctgtgcaatggcccgttcgtagatgtcccgcacccgctctgggtcacccgcagtttcctccaatcgggcaaagtcaaaccaaatgtcatagttgcgagggttctccttgagctgctcttcatactgcactctgcgtttggacaaaaccacatcctctacaccttcacgatcaccgtattgcttttcgaaggtcgtgtaggccttgtgaagaagcatagccttggatcgcggaagccggtctagggcatacttgtaaatcgctcgtgctcgctcatactccttcaacttagcctcgaatttggcatatgcgacaaagagcttctcgtccatgaagtcctcccctaacgtttcgatagccacaccgtagacctcgcgaactaagtcacttgtgccgtactcttcctcgaagcgggcccatttgatccagtttcgaggctcggggtggacgacggtaaatcgctggaaaatggcacgtgctcgttcgaactcgctatatctcttctccattttgatgtatgcgccccacgcaccctcttccggctcccatgaaatccatcgctcgaacacttgacgggtaccagggatgttgcctagtgtctcctccatgtagacatacttataccagagcttgtcgatgcgggggaggatagtcacggcgcggtcgaggaggttgcgggcatgattaatattccgggtcttcatctcagcttcgatgtagcgaatccaaagcaccaccgaggtcggatcgacgtcaagcgcacgctcgaagatggatcgcgcgcgacggaattccttttgttcgagctcccaggcggcatagcgcatccagttgttcatattaatgcggttgcgttgtacatagtcttcaaagtcctttcttttccgaccctggtactcgtgtagttcttcaaggtcggcaaagcgctgtgtcggcgcctcaaggccaggctcttgccggtcaacggcctcgcggagaagttgctccgcagagatctgaactggcgcggcggccttgttcttgacccggggagggccacgggaggcctccattttgatggtgctgtattgactgatctcgctagagaggtggtttgtgacttaaaagattgtaaggtgaggttcggttcggggatgtcgaaattgtcgggcaagtaatgatggttggacaaaaggaggggtttgaaagatgaagttggcttcaccaaatcgcagcgaccgcttaactcagaaattgacacgaaggtttctcacgcctaatccagtgacgccgagggtagcttcgacccgcagctcagagaatccgcgatgaaatcgccgaactgcgtgactggtctttatcgccacccgcgcacgtagcttccctatgactaatcacaacttttcttccaccttagaactctaggaatatcgttgctctcattctagtttccctagtggcgttctgggaccacgatcacaagcacctcatacacggcattggacccgtcggacaaattccgagtcaagatgtcaaccgctgaagagcttttacgcgactttgaggatgacgaggaggacttcgatgtgggcgaaggcgaggaagtcgacgaagagcccgagcaacaggaagactccaaggaaggcgccggggcttctaacgactttgatcgctctatttcaaccgccgatgagctaacacgcctacacaaagtcctgcgcgaccattactccattcgattccccgagctcgaaagactcgtcaccactcctataaaatacgccaagacggttgctgtcattcaaaatggccccttcaacgacatcaaggcgctgtccacatcatcagagaatatggttggcgtcccactcaagtcagtcttggacgggccgtctctgatggcagttgcgatggaagcaactatcactaaaggccgggaaatgaccgagtctgagctcaagctggttctcgatacatgcgataggattttgaagcttgatcatgagcgtgctgctcttaccgcaagcattcagtctcgcatgaaccagatcgcccctaacctggcagctctcatcggggcggaaacggctgcacaattcctcaaccaaacaggtggcttgcttgaactagctaagatcccgtcctgcaatttgggtgcacaaggatcacgcagatcagaaggactgggctttgcgaccaatcacggtgttcgagcccaaggtttcctctacgactcgccacttcttcaagaggttcctctggacctcagaaaacaaggaattcgaattgttgcagccaagatggtactcgctacccgcgcggatgtctccaattacgccaaggacggttctctgggcgaagaactgaagcaacaatgctatacgcgactggagaaactcaccgaatctgcgccaaacgccggtaccaaggctctccctgcgcccgatgataaaccctccagaaagcggggtggttggcgggcacgaaaggccaaggaagctgtggctatgacggaactacggaaggcacaaaaccgtcttgcattcggtaaggaggagtcagaggtgggctacggcacgggctctggaaccgttggcttgggcatgctgggccaacaggacgatggtcgcattcgtgcaactcagatcgaccagcgcacccgtgcccgacttagcaagaacaacaagggctggggcacaaacacccccgctagtggcactgcctcatctttgcgtgggtttggccagggcggtgcaagtggcactgcaagcgttcttcaggcacgaggtattcgtgcatctggcgtcggatcatctctacctggcgccgctggtacctctagtactattgcattcacacccgttcaaggcctggagctcgttgacccgaaggtgcaagcggaattgaagcgcaagcgcgatgctgaggaaaatcggtggtttaagtccgggacttttactcaagctcctcatcagaatcctggcaattcacagagtagtgaaaatggcggcttcaaggtgcctgctatcccactcaagaggaaggctgatacgggtgagggcaagatgggccctccgcctaagcgttaaagacttcatttgttttctaaatttcttgcttgattgctttttatcgcggcattttgacggcgtttcagggggaagatcaggaggcctgagcttcaatatgatttacgtgataccaaacccgattgtatattagatctgaactacagtcctcaaaatgacatctttttaacggcggacctgtgaatctcctttttttttctctaatacgccgacataaaagacctttattgactgtttgttctctttcaccaaaccagattgtgcaattcgagctaggctcttgtaacagaggagagtcgatgtcatactgattctttctgtctttgaaatcatttaaaatcagagtttgtcctttcatattgaaatcctagtgccaagatacgccagttagtctctttgtttgcctggtggtgaaaggattggggacggcaggtttcctctccatttgagaatgtttccagcatcagtccatttgctgtcgccaacttgagaaatcagagaagaaattgccccgaaacactatgccggacgatcgcattgatccacattacacttagcccctggttttgttgactgatttatgtgaatcgagccaagcgaagcttagtgggcttgtcaagtcaacactcgaggacgatctcaagtcccattccgaccagtattacggaacatctgcccaagctgaaattgcaactcattaagtcgaggtcaaggtccatttatggtcaccacctcgtcgccttctagagtctatcgcccaacaaggtccacgtcgtgatagtcaaagcaatctctatgcccttgctatcctagcatatcgatcgggtcgaccaagaatcatcgcagcggatgaagcaaccaaacgtcagctgtcaggtaaatttctcgaagatcgtaatctatattcaagaagagaaggagggcgcatctcggtgattctcttatccacacgcagggatcccgattcgggtgagtgttctgttttcgcaagacgagccgtgtgctccctacagaaatcatgttcaatatcgacggcctagaaaatgagtttggcgattcagatcttcaagcaaagctgttcagatccgttcataaatcatggggacccttgcgggcccatggtcaaagatggaggggaacgatgttatatgacccttataaagaactattcaagcctgggacggcagatattctaggaagagagcactatgccaacgctgtgatcactgccctcagtcgctatctacccatcgagctggccatctaattcaaacagctccccgatcaagatgccggtatggaatcgtcgtccaagtaacacacatagagtcatcttcctcctgtattctcaacacccgaggacgttgagaatacgtatcaaagactaaaggaggctggtccaacaaagtatcgctcgaggttcgcaccagtggcaaataggaaattcatttgggagatcgagaggtacaccaagcctcccatgacactagaacttgtttcgtggggtataccgcatgaagacccgtcgagacctcgtcaacttctagaatgaatatcgtgtataggatgctcgattggggagaatcgaaaatgaagtcctgccaaatgaagtcctgcctttgctctatctccccagaccgctatctgccctggacgaggcgtttagcgttcttacaagcaagctccttcgaccaaatttattcttcatgagaatgaaaatctccgatatttgcactgacagggagaggtgaggttctcacgttggccctcgcaaacacggtatcaaagagataggcatctggacgaactatttttatcgatctacctctttggctacctatcatcgcgacaaattgggtttgagctgcggtcttcctcacaaacaagctaagcaacgccgcaaaacaaacattgaagcagatcctcgtcccatccgttgaagtggattcggacgggtccagtgatgatcctcaagatgatccattaggccccgagtatttaatcataccttggcacaagaacgctatggtcgatggaaaggtggaagatatataggagcttattcaggagctttatgtgcatcctcatctgcgcggaaaacgcacagtatcattcgtttgtgtcgatcggcagtttgaacttgatcgatcgttcattctgctccaagcagatgagttcaattctgacccggggcatgatttactccaacccttgcccttcccgagcctgagagggttcaaatatacgcgtgcctctactgggttggcatttcttgaggccccaaggcaaaacatgatcgattttgatgcagtggaccatgattggtcaaaatatcgaagaccgggatggccggcacctggggcattgcctgatgactctgtagaggatatagagtagttgacgggagcgcttacccttgaatttaccagtggaatgaatctatggatgacttaagctgagttgtttcgttccaaggttcagttaactactagttacatggttggctacatctgtagttagttgtatgggactatctgcgttgacatgttggcgggatcacttcacagcgcaagagatggtgaaatgaatacgtgtgtaaagaaataactcgaaggatttgatcctttatgtaagagaatgttcaattggatgtcagaggtaagcccaacagacccaatcgacgacctaagcaaatcccaaatttgccgcccacattgcgtgctcgtccaagcacacaatcgtggaatgtggtacagcatccacggtatatagcggtcaggggagtgtatataaaagcctgtgcctgcaattttcttttcgatattgcgtatataaaattttctataaatttaggttcgcctccacgttccgaacttccgccaaatcctatttcttgcgctacttgggtccccaatttcttatttccctcaaatttggaatctttttaaattagattcacagagatttcgaagcatgacgtttagcatagccaaatcggtcctcatcaacccagtcccagctagcaaaagcctcccagacaagggcgaagggcaagaggttttaagcttaactcgactcctgcatcacagccatgttactacagaattcgaccccttgagatttgaggctgccgcatcattgcaattgaaattgcagctcgaggggcaatacccagatacagaaacagatacgcgactcattgcgtcgccctacaacagcgtcccccatctgctggacattgctgcactggaaagacaagaccgactatttgcattggcattggcatatctcaaacctatccgcgacgactatgccaccgctgactacaccgaatcattcaactggaccgaggtgtatgatttgctgagagtcttctcacaggccgaaaaccacacatggaaatcacagtcatactatgttgttattttccgatcaatattgttgccggatattgactcggaccgtctttatgatctcgatgcgcattcgcaccaggaggccattgctagtggcgggctgttgaagtattggtttggggcgaagaatgacaagcatcgaaatctggccacttgtgagtatttgactattctatgttattctgaccacatgctgatcaattcgaataggcatttggcgcagtcgaaatgacgcgagacttggtggtcttggaccttggcatgctcaggcaagagcggccgctgcagtaatgtatgagcagattcggttcactacgctaaggttggatattgcggatggagtgcagtcctggaagctgagtgattggaaggaagatgtgctgtaaatagcatcgttggcattagcaagattagatttttgcatttgatgtggtctagaacgacatgacattgtgaacctgtacatctcgatgaatggctaacaacaaatattctatatacgataaataagacgaaattaacgatgatagacacaattctccctctgatggcgagaccaatgaaccatcaaagaagaatgttaaaaagaagacaggaaaagaaacgagcgcaggtgagccggtgatgttgttgatcttgtaactgtttctcgcaatccctcgtgtcttctggcccatacaagacagatcatgccctgatcaatgcaatcaatggagcctatgatagatcggagctaaagtcccctcacttttcaatatgggaccatggaaagacaagcaaggtctctacacaatgccgcggcgggtgcaagaggtgattgagagagatggacgggcttcacagtattaaaacaattgaatacagtgattaataataaattactggcaggataatagtggagaactacgtttgtttcttggttgccctgtagaaagaggacaagttgaaacagaggagtatgcaagcatgggacagtatcactccatcattccagtcagtttagattgtaagcccagtgagccctttttcttggcagagttattatgattccacaagggcggacgcacttgattcgcaggagaatttatctctggaatgcgttctgtcgtaactagggatcgacataggcccctagatccacgaaggaactctttgctcaaggaaaagttattttgttataatcaaggcgagctcgtaagacgagcatcttatttagaccatcttagctgaagaaagcaaagtttgaattgatctacaagagaaaaaaaaaaggaagataccctgggagtgtaaacatcggcattcaagtactatataaatcctcattccaaatgacaagagactggcatttcggtaatttcggatcgcgtatccgcgtttcagacgttaaatcttataatagttgtgaacttgagatttatctgtttccaattagtgtcaggaaaatatctcattttcaagcatccactttatcacaacatacgcccaaattcatacaatatgtctcaagttattccaagggcatcatggctctcactcatcgtggtagcactgctggcagtctccactgtcaacgcacatccagtccaccaggcagacgaagagatggaaaaaggacacaccggtaaacttgaatctcgatcaccggttagtccctcagacattgcattctgccattaaaaagcacacttctgacagaagtatagagacttattccagatacccagaagtacgttcatgacatcttgcaagggttgggcctggaagagccaacctcaacctcaaccttaacaccaaccgccacgcccactgccagcgtcaagaccaagcaggactcggagagcatgaatccaacaaaaaccacggagattacctactccagctctaccagttacacacccacttatagcggcaattcggcaagctacactcatactgtgaagaacgtgcacagctacaacaggccagtggagaacgctcagcttgggcatggttggaatggggataagaaagttactgttgatgatctcccagctgcctttgatgctttgtataaggtattggagcatcgattgaaggatgcaattgacagctctgatgagattggattggatgaattcctgtgaggatgtttagtgctacgaaactcgaagcgatggattattgattctggaaaatgtgaacttcaagatatactatgtactactaatgtcgtattaggaggctatagtccatgactgtaataatatcgctactccctacattatcggtgttccctaaactcccttaactccgtgttccgatcccaactccggaaattagcagtacaaatccgcaggtgatgccggtaacccggacgagaagttcgatatccaagttattaacatgatggtttacattgacggagtgatcgcacgaagcttgcggtgaaaacctgtaactacgatcaatcgatccaaccccgacggcggggcatcttgaaccccataaaaggcccatcgcagcccgccaacctcgactttctaccaactatctcttctcaacaatttacgcttatcatttacattcaaccatgccttctatacttggaaaggaagtcggctctattggctatggcacaatgagtgcgatccccctctcaaacacccacaattggcggacacttcgctgattataaaatcagggatgacctggaacacgcagcctccatcagaggaggtgtgcttcgagacactcaacactaccctggaattgggtgccaacttctggaacgccggcgagctgtacggcactgcagattacaactctctgcacctgctcaacaagtacttcaccaagtaccccgagaatgcagacaaggtcgttctcagtgtcaagggtggcttgaagaagggcgagcttgccgcggatggctcggaaaagaatatccgtcgtagcgtggacgagtgtctgcgtctgcttgatggcaagaagaagcttgacattttcgaatgcgcgcgacaagaccccgcgttccccgttgagaataccataaaggttctcgcggagtatgttaaggagggtaagattggaggaattggcctgagcgaggttgatgccgagacgatccgccgagcgtatgtgcctcttgattttatagtcgtcgtcttcctatggacaaactcaactctaactgcttctctagacaaaaggtgcacccgattgctgccgttgaggttgaaatgtcgttgtggtccaccgatatcctccataatgacattgccaaaacctgcgcggagctcgacatccccgttatcgcttactcgccacttggccgaggtgtgctgaccggagctgtgacctcgctggccgatatcccccagggtgattttcggcaccacatgtcccggttccaggaagataacttcaaacataacctgaaactcatcaacgaggtcagtagccttgctactcgcaagggtatcgctcctgctcagattgcactggcatggatccggaccctaagtgagaagcccggcatgcctactattattcccattcctggcggtactacgaaggacaaggtggttcagaatatgggcggtgcacaggtgctgacggattccgatatggctgagatcgatgctgttttggaggaacatacggtttctgggcctcgatactaaggagttcctgcatgagtttttatatttattattagagatagatcagaaatgtgatatgtgcataatgccaatgggtatttgtataggtcagatcaagtgtagaagagtcaacatacaatctcacattaataggtgattgtcaatattgtataattcctcggaattgatcatcatatagtatgtaaggcagttgagaggatccagtgttgcgtagaattcattatatagggtagtgcgcagggcgaaggcgagcttaccattgggtcattgtgatgtactaatagagggggtctgagtattactaaataaatgaatagcatgacagagacgaagattatgatcaacgaatacatataagaccatggaggaagaaagagagggagattagcgttcagttgtgacctcgcagtcgatcacgtgatcccgttcatccacggctgaacacgtgatgtgatacgatggcctccctcgcgcgacatctacagtgcagctaatagacagttcaaatttgtttgctgccacttccattttcctatacgagctatgccatccacaatggcttcacgagactctcccggttcccctctctcctcggtgggatccctcgagacttcagatcatgaatccatgaaacatgaaagccgcgcgcattctccctcgatgtctaacatgccgccatccaagcgtcgtcgcaccggtggcgcatcctgggaccgtcaaactcctctctcctctacccatgacgaaaaccacccacctccctccccgactgcctcgatctcctccgatagctccggcgatattcccaactcccctagcatccttaccctccttggtaccaatcaagaagatgactacagcggccaaagcaccgaccaggttactatttgccgatgggatggatgcaatgctggcgaccttggcaacatggatgggttggtgcagcatctccacaacgagcacatcgggagccgacagaaacggtactcgtgcgagtggacggattgcacccgcaaaggtcaaacgcatgctagtgcttatgccctccgcgcacatatgcgaagtcacacccgcgagaagccattctactgcactctgccgggtaggttgtctcagacccagactcgagcaaacagatctcgagtattaacaatgaaatacagaatgcgaccgcaacttcactcgctctgacgccctgaccaagcacatgcggtctgttcacgagactgacactatgcgcccgatcgactccatctcaaaagtccacggcaccccgggcagcactactggcacccctgcctcgaagttgcaacgcattcgcttgaagctgacccagcccagggagccgggaagtgagtctgagccacacaccgaagcaatcactattgtgccaactcccacccccatcataaccgacgcacacgatcccgacgagacctcgatgccagagtttggcccggagctcgacttcgacgaatcggagctcgccctagctccgcgcgacctctaccgtcttctccgtcgacagatcgcgtgggctggcaaggaggccacacagctgcaagccgagtgggaaataattcgcccgcagcgcgagcaagcatggcgtgagaaggaggctatctttgacgacctcattgacgccgagattggcttgttcagcgcaatggtcggctcagtaccccccgtgcacctaacgaccagcctcgaaaagttgcaacagcagcaacagcagtttcagaatcaacaggagcagctggccaagtcggcagaggtgccgactatcgagggcagcacttagttggcttgtcttccctttcttctctcttttctctcctccccctgctttgctcctcctttctctcaaccttctctcccctgagaccatgctttggtagcttggtctcagaactgtgtcactctgtggtcaccttttcatttgtaaacctctcatatcccggcgtgcatggctttggtgaatgcgttgtgtattttcaacccaagcagaaaagaagtgtcctgcaacggaatgtatgaatagcctcatttctttctttatttctttcggtctggcttgcaggctcagtgacagctcaccactatgggcgatcactacaattatcaataatcaagattttcttctgatctgggaattataatgcaaggctacatagcagacagaggccatgtctagtcgtcaatagagacctaagttttaagacactgaagaggacgtagccctgactccgagtgcctatcgaccctgaagggcaagtttaagaagtcattagaaggaaagacatcaaatggcgtgccatgttgagatgtgttgagacgtgcggtgacgattgcgcaattccatcgagttatacgtgacgtttctttaagtgccagtgtcgtcgggactaactatatagcttatattcctaaacttatttcttttcttcttctctgttcttctgtatagataatctaagagctatgaagaatctaactgctgatgagcggtaccaactggcaggagactactttgctcctaaggggctctatgagtacaccaaaagcctacccttcactggtcgagtaaaaagtaatgttaatacacttgtggccggggaatggacggagatcttgctagactatgaggttggcgcatcgggcctagcagatggcgcttggataaaggccaccttcaaattctactcggtgagtgaagaagcccgatagagcaggctgcagacttgatccaacatgaccgagataggattgggtactgttccagacatcagatcccacaaaagacaactatatcagcgccgagtatatcccaaacagccttttcccagaacagacacccgcgacagttcaatccctggccattcgatttgatcaaaagggacacgagcgacctttccaaaaagctgtgattgtggatattcaagatggctatatgaacccaggcgatcggattctgattcgactaggtgatcgtcgcttcggcggccgaggaacgcgggctcagacattcatcgagaaagacttccgctggaggttttacattgatcctgttgggactaggtgagtagtattatgacagcatcacagcgattgaatctggtgaaagctgactataccgccatagtcgctttgctccgattcagcctgacctctcttggaacatcgtcgctggtcccattcatcacctccaaactgtttctcctcgcgtacttcagccctctgttccattttccattcattctcataccgaggatatctggggaaatgtgactagtgatctcgagaatctttccttccagctgaaggtgctagacgaagaccggaaggccatgatcgtcaaagaaagttctgcatcacagcaaggctggacgaatgctatattctctggtctcagcatcgaagttgacggcgactacaccattgaggttatcgttaaatcgaacgagaaaaccattgtatcccaaaccacccaactcaccatttcatctggtctctcagttcccaaggccctcttcggcgacttgcacgtgcactccgacgacacagtgggaaccgagtcatcaatctacaacttttcctatggccgagaaatcgcagccctggatgttctaggatacaccgccaacgacttccaaattaccaaggaacgctgggatgccacaacagacttaatcacaccgctcaataagccgggcgagtttgtcattttcccagggaccgaatggtgcggaaactctgcagcaggaggagaccacaatgttgtcttcctggccgatcccgctacacacccgcccgaattccccttcgatcgccatgggaatgttgcccgttcgtttgaatggtccgagcatggtcccaaggacctcgtccccggagcttggccattggatgaggtatactgcacgtatgcgcgcaaggcagatgaccatatcctcattccccatgtcggtggacgccggtgcaatctggcatggcatcatcctaagctcggacgccttatcgagattgggagtacatggggccagtttgagtggctcctccaggacgcagtacgcagaggatggaagcttggagtctctgctaattctgatgagcaccgcggtcgatgtggtggcggtgttcctggcacagcagtgttcggcacccgaggcggtctcactggcatcattgcccccaagctcgagcggcgggatatcgctcatgcgttgagagcacgccacaccttcgcaaccaccggtcagcgactagtaggactggtccagacggcggaccagtctgctatccagggtgacgaaatcaagattgccaaacaagagacactagagctgaaataccagttctttggtgagaagggattctcgtcaatagaggcttttaatgaatctggcctgatctggcgaagacatttttggtccgagtctgacgcacccgccaccattctgcgggtgacatggggcggagcgagattatacgaccgctatcgtgaagctgtttggaacggaaccattacagtctcagataccagcattgaggatgttttgccatttggaggcttcgaggacaacgcagaagactttgcacgccaggcgggagaaagcaccgttgaattttcaagcaaaaccagcggggaccttgatggtgttcatgttgtttttcagggcaccaagcccccgcaaaaaatccgtatcgcaggctccctcggtggatatgtcaaagttggagaccccttggctggaaacccccacaaagcccagcctacattcgagctagaggcctcttgggaggaggccaagcgcctagatggaaaggtcatcgaaatcctgggtggtgcggagctgtttgtgcgtattgaagcaatcccgcaagtggagctgccacggcgggttcagggacaagcatcattcttccagacaggatcacgctcgatatactttgttggccgagagtggagtggagaaaaggtggtgaccagccctatttttatagactatgtatgaggctaaggttctcggggcttgaaacttggacgagatacctaaagtcctccctgtaatgtcagattgctgtatgccgtagtatattatatgtaatggtttacagatatagttgtagtcttgaatagtaattcatattgaggctaaaatgccctgttcttacgttggctccaagataaaagtgaatgtcaaataacaccccactgaatgatagcaggaagataaggaaatcagtcgacgccattacagccactccataagatacatgtgctgagagagaaaacaaactgcccttgattacggatacctccataggtagaagccctgatatgcccacgacatacaagaaaagcaaactaaagcaaaggagatatgatatgattggctctatccaggcaaaaaaaataccatagagaaccagtccaaaactccccaacaggaaaacatagaaaataaaaaaaaacctccagacaagccatgcagtgatcatccaagaccgtgctcactccaaaaattcttctttttgtgctgttggggctcacgcaataattcgacgccatttgcaatgccatgcaacaggttgcatccgtatgtacctttaaagaacaaggagaaaaagagagagacgaaggtcacattgataggggcatctcaaggaattgtgcgagatgttagaacatggtcaataaagactccaaaatgtcgagtccaatataagaagattgcaggtgggtacaatgtagtggtagagggagtagagatcgccaaaaaaaaatacgctgagtgtctatcataaaaaaatgaaaatgatagatagatatttgatatcagaaacgctgaacgtgcatatcatcaaaccgtgctaaagtgaagttgaactgaaacaaagaacatatgtacccattgagatacggaactcctcaagccgagctaccattagaggccttggaagctttactggcttccatgaccttattgaacatctgctgcagcttagcaccactggcatctttattcggccagtagttgagtgaaacataatccctgaaagtcaagtcagaacgggaaaagagaattgtgatagcaaagagaacttaccagagtcggacctctagggagggcatcgattgcgagccctccagagtattacgaatgaattcgccaattttcactagggtaaggcgaagtttctgggcccgctcgtttttgcttgggtaatttttggcagtgatcattgccacttgcttcaaattggcaacaataggcttgaagaacatgaacgccatgtcttctttattagagccgccgttctcatgccctttgcggcgacgaagctcgtcattagaggcatcggataaacgatggcgtggacgatcatcaaggccagatcgtggacgagagtcatggctgggagtatgatgacggtctccctccctgctggcatgcgtgtgggggcggggacgtgatcgatcggattcacggtggcccttgcggggattctccggcctgcgagaactagagggtgccggagaggcggagacactgccactaccggaaacccgtgagccacgcttgttgttgcggtggtgattgtcgactgcccttctcgctgtagcattgttgttgtacttgttccttagaacagacatgagatattcagctcgtcgaacaaggtggacagcgcccggtgattttgtcgccttctcctcagtctgcaggcgctgtgtctttcgctccactcggtgttcctcgaggaagaatttgtcgccaaggccaagctcagtgtcatcgcgaatttgggtccacgcaccaaacccatggcgtgcgatgccgacaagaagcattccgtcttcacgtgcaccccattggcagctgtagtccgccaatttggtagcctcggggagtcggaatgtcctgaaatcagccaatgctttgatgatgcttcggataaggcgcatatctggtggacgttcaacgatagtccatgcattgagtcgcttgactccgtgatggtcgaacaagacggccttctgttctttcttcgtggggtttctacccgattgtttcatggcctctaattggtccagacttgcttggacaagcgagtttgccttggcggtgatttcatgaagagcatcacgaacggtgcctcgatcgcgagtttgtaatctggcatcctccagaatgagatcttcggagtcatccagatcgccgtaacgaaggaatgctcgagaaagtgcacggtattctttttctccgaggggacgcctgggatccaacgagggactttcttcctcgccatcgtcgatattgacttgagctcttgcgagccgtttcgccttacgttcctctcgtgaatctgtcgtgtccgtgggggcgtggcgcttgcggggtcgattttgctcaatgacttcagcaagataatggtcatcatctttacgcttttcctcggccttgagcacttcgagctgttccttgggaatgatgtcgtcccacgtgagatcgtcaactttgatatcgacgaagtcaaacgctttcaagaattcttcaccgccgtcggcttgaatttgctcagcctcttcggtttggtgtaattctgcgtttgcaaggacggaatcaatatcaagctgctccagcttcttctggttgtcggtttgttcgaacatcttctggccgcggcgcttgaggatccgagagatatcatctgtggaattaggctcggcaaccacacgagccattttgttttgcatctccgaggcttctttgtcggtgacaccacgctggatggtgatgaactcgagcaagagcttgttgcgagctctttcaataacttcttcttcgatcgtatcctttgagacaagacgataaacgctgacaggccttgtttgaccgattcgatgagcacgcgccatagcttgcaaatctgcctgggggttccaatccgaatcgaacagaacgacagtgtctgcagtcataaggttgataccgagaccacctgcacgggttgaaagaaggaatgcaaagtcggtgctaccgggagcattgtaatgctcaattgccaagcgacgggcagcggacgggatagttccatcgagccgttgatatttgtaaccacggtactccatatactcactcaggatgttaagcatgccaaccatctggcagaagatcaacactcgatggccatcaacgctcaacttgcggaggagttgatcgagaagcatcatctttccactgctggtgatcatcgctcgaagaatatcttctcgacgagtactaccttccaggatctttgcttctgcgttggggaacataaatgggtggttgctagcctttttcaattccatcatgatgttcaaaagagactgcttcatccccttgttcccgtcgttgagcgctgcgtagtttttggtcaagatattcttgtagtattctaattggacatcggagagctccactcgaatgattttctcagtcttcgggggaagatccgactcaaccttggacttggtacgccgcaacatgtaaggctgaatggcggtagttaattccgcgagtttttgagacgctgcctcggaattcaaatccatgtcgacgtcgacttcaatgaggcccgggttgaggaaatccattaatgctgaaagctcagcaaggttgttttggattggggtaccagtaatcaagaggcgtgcctggcatttccattcgaacaacttcatgtaaagttgtgaatcgcgattcttgagacggtgcgcctcatccactgccatgaattgccacttgaattggccgaggaagggtgagtcattcattgcatactcgtaagttgtcaacagaacatggaactttggacgtttgggattcccatcgaccatcaattcataatcgcgcaacacggagcgcgccttttcactaccattgtaaacaacgtagttcagatccggtgtccagtgatcaaaggtatcagcccatgccggcatagtagacagggggacgatgacaatgaacggcccttgctgccgcctgacatggcgcatccagttgatgaatgcgacagtttggactgtctttcctaggcccatctcatctgctaaaacaacattgcgacccctaacccaattgaaagccaagaagtttagacctttgacttggaagtccttgagttctccattctgcaagaaagtaggggttccgtggatgggctcaaaggatttacgcgtggcgacatttatctcgttcttgtcggagataggttgtcgagcggtgcggtccaagaatcggtcaacctcacgctgtgcgatctcagaaaccagatcctctggctcccaagtacaggaatcgtagagaagacgtttccatttgacaaggtattccgtggtaccatcctcgctatcacgtacaccaatgacccgttcaacctttttgtagtcctctatggcctcgacgtctcgttcgcgatcgaggttccacttttcgcggtcttcaggaggggcgtcgacactgtactgcaaccgaatatcctcattgagtaccttccgaacataattatccacgcgtcgcgtgctgcggaagttggcaatagattcattgctttcccatgtagcatgatagtgtgatttgtcctgccacttgatacaaaattcaaagtcgttgcggtcgagatcatgagctttggggtcgacgccctccttgaggcggtgattcaggacgacgtcgacagcggggcgagtgtcctccacataactctccgcccagtagttttgtggaagatcttctgggtcttcttcaaacatggcttcgtcttcctcgtcatcctcgttgtaatttgacaccttcttagcggttcgtgttgagaagcgaacctcactcaatgaaggctcatagctagcagtttgttggagacgccgccttctcgctttgctggcacgagcactctttccaccatactcatcactgtcagactcggacagggacgacacagtagccgatcgagaggccttagatggttgctgggatggatctttgcgccgacgcttagtacgtggtgcaacatcatctgagtccgaatcagatgagtcggcgagatggcgcgtcgtgcgagcacgaccacttcgtcgaagcccatacagatcgggattttgtctgatcaggtcggtctcgctgactggtgacgatttgcgcttcgcaccgcggtcgggatgaggagatgaagagttttcacggctgtatgtgttggcgtcataatcgctgttgtcctcagctacgtcctcattttccgcgtccgaatcggcagacgcgccgtcataggagtcgtctgcggcatcgggttcgggggaggactcggagacggggtgggactccatgggctcggatggactgcgctcatgttgccttaacgtatcgccatccgcgtgggtatcgtccgcgacgggcgagagagggtagccattagacatggtcgaggtagaaggaggttcctgagcaggtgggatcaccatgccagaggctattaccgaggggcagtcagcattgaagcttgattcgggctaggagaggcatgaaagagatagggacgggtaaaacaatggcacgcgacccaaattgcggtcaaattgagcctaaaatctagcagaatgggacaggatattgacttcgatgaaagagtatgttttttgataacgggtgggatggacgcggccaggctggaaggcaaagcaatggacagattgatacacacaaccagactcagagaaagcagtgacacgctgcttgaccgacgacaatttaaacctgccccaatcggaatagaatagaggcattcaaggattcgtgcagtgggtcgacaagcgcggagaagtaccgcggcgaatgcttcggtcggcacgtctgtgcttgaggaaaagattaaatcacttacactccatagcgtggtgaccccgaaagcgggggatctgtcgatcaatgtgggaaagtaaatggtgggggggaggcgtgaagctggaaacttggggaggaggagacgagagacttggaagaactaagagttggggactgactggagggtttgcttcggtttggtttgcaggaaagtagacacccgatctattaggcatcaatagagcgtaaccctattgagactagcttattcgcttggcgcctggcacggcgtcacatcacgtggctagcggagctcggagaaaccaccaatccgaccccaggtcagtagccaatcaccgccttgataaataagtgacggatgtgtggcctaaggcatcacagcccacagaaagcaaagcaaagtgcattcaattctgccgcccctcgttcgttgatagtagtgtttcttcctgtcttatttctagtcgagtctgcgcagagatacttggtgcttttgctgagcccggttcatttacctgcgacagcgcttagtcggccaatctcaaccccccgcccctccacttggtgctgattttttttttttcaatccgcttcatatacacggtttctttgaaccacatccacccaccatgtctgacaagcttactcggtatgtttatggagcctttgaagtgcgatatcaccagctaacggtatacttctctttatagtattgcgatcatcaacagtgacaaggttcgtcgcgacatacccccactaataatattttctccccggttcatgaataactggctcacacctcatctttccaactttacagtgcaagccgaaggtacgcgattcgatataatatttcattgtgctcagggaggctaattagttccagaaatgtcgtcaagagtgcaagaaggcttgccccgtggtccgcacaggcaagctctgcattgaagtcgatcccacttctaagatcgctttcatctccgagcgcctgtgcattggttgtggtatctgccccaagaagtgcccattcggagccattcacattatcaacttgcccaccaacctcgagacccaagtcacccaccgctactcggccaacagcttcaagcttcaccgactccccatgccccgtcccggtcaggttctcggtctggttggaacaaacggtatcggaaagagtacggctttgaagattctcagtggcaagctgaagcctaacctcggtcggtatgacaaccctcctgactgggaggagatcctgaagtacttccgtggttccgatttgcaaagtaagcaccatagaccaagtacagcggtctttattcgaagttgctaactgtgacagactacttcaccaagattctggaagacaatctaaaggcggttgtgaagcctcaatatgtcgaccagattcctcgtgctgtgaagggacctattcaacaggttcagcagcttatctcggggcgcgctgcgctgggtaacgaggaggagattatggatgttctcggtgcgttgacatgctccaatatctcgaaattcgcttgctaatcttcgtccagagttgagacaagttgcgcaccgtgatatcggtcacctttccggtggtgagcttcagcgtttcgccattggtctggtttgcgttcagaaggccgacgtgtacgctcttccttcattagaattgatgccattgaatcctttaggttactaataattatctaggtacatgttcgacgagccttcctcatatctcgatgttaagcagcgtctggctgctgcccgtacaatccgcagcctcctccgccccgacgactatgtcattgttgtcgaacacgatttgtccgtcctcgattacttgtccgacttcatttgtgtgttgtatggtcgtcctgcagtttacggtgtcgtcactctgccttcatccgtccgtgaaggcatcaacatcttcttggacggtcacatccctaccgagaacctgcgattccgtgaagaatctctcaccttccgtcttaccgaagcgggcgaggagtttattgcggacaaggatcgtgccttctcctacccctcgatggagaagactctgggtgacttccacctgaagattgatgccggaaagttcaccgactctgaaattgtcgtcatgatgggtgagaacggaactggaaagaccactttctgtaagatgcttgctggtgcattgaaacccgatggcgctatcaccatccccaagatgaacatcagcatgaagccccagaagatcacccccaagttcacgggtaccgtgcgccagctcttcttcaagcgtatcaagactgctttcctctctcctcagttccagaccgatgtctacaagcccctgaagatggatgacttcatcgaccaggaggttcagaacctgtccggtggtgaattgcagcgtgtcgctattgttctggctctgggtatgcccgctgatatctacctgattgacgagcccagtgcctacctggactccgagcagcgtattgtcgctgctcgtgtcatcaagcgtttcattatgcacaccaagaagaccgctttcatcgtcgagcacgatttcatcatggccacctacctggctgatcgtgtcatcgtcttcgacggccagccatctgtggacgctcgtgcccagacacccgagtctctcgtcggtggttgcaacaggttcttgaagagcttggatgtcactttccgtcgtgaccccatcagttaccgccctcgtatcaacaagtacaacagtcaaatggaccaggagcagaagctggcaggcaactacgtaagttttctaagttttctatctcatctatggatgctattgattccattctaaattccttgctaactatattcaacagtacttcttggaagaagagaattgaaaagggcgttcacaacgagcatcgtcgccgtcgtcacaaacatgacggccgcgactatgagcagcggcgcaacaggcgccgcggcgattggaagatcatgtggttaatggggatcccaggcgtttgcagagcctcggcggttcagggcaagggataccgtcgccgcgccggaccctcttcaggtgccgatgacggtctctcggacgacgatggcgatgatgacgatttgaatggcaacagtgaccccgactagaaggtagtgacctggttcacaccctgctatccctggtctagtacgctcatttacttatgcgacctgttgccattcgtcagtctatcaacaaatgcctacatcgttattcgccttgcgacctgccttgatttgctctggatttttttatcatatccagagtcatcggcccccggttgggaacacatgcctacagatcttccactagcacctattaaattttaatggtggatgaggttcggcatagtttttttttccaacggagttatgtttgcattaggttggaggggttgggttccaaaaaaagctctccatgaattttatgatttgtttaaagatggaatgtcgcgtcggaatggattggcgatgaggttgttttcagaccggggatggcatagaacaggaaaccgctgaaaagctgccaggttcgttgcctcttcgtcgtgtagatagatagttttcaacccattgttgtgcatatgcttctcttgttcgtatttttgatccaacatatctctctagcaggcttctctagccacgcgcaccccgaattctacgaagcagggacactgccgcctttccttttgggtcgaggtagccatgtggataggcaagtatgatatatgattctgtagatatatatatagagagagtaccagtatacaagcattgtgtacaggagtgtacggatatatataatctgggagaaactggccatatcctgccagggagtcaaacggacaagtgggatctgacttcaactctttgagctatgtatgtactatccacggggagactataggtacacattggggttgcggattatttacctacgctattcgcgggggcgagccaagcccgatatatacaaaccgaaagaggttccttataatttgataaagggcagcatctgctagaagtgcaattagtgcggcattaggagagacattacgagatactcaaatggctcagaccctaacttttgacattcacccaagcgggagcgtgagctcggattatctggtgtgcaagtcggagtagtagatggtctagactggattactgggcctggaagaaagcaaatgagattgcaggatagattcagctcaatatcctacatgtgggttgaagggcagaaattacttgcatatggtcaagcgtgaatgagaatgtccatccccatctactcctcttcaatctctccttcctcgctgccagagtgaatggccttctcatctttcttcgcatcctcgatctcttcttccggaatagcggaccgttcctgtcgggggactctcggacccttgctgcgctcgcggctctcacgtcggtaccgcttacggctagccacactctcggtatcactgtcacgtcggcgtcggcggtcaccactggccacactgcgagtgtcaacagcaccagtaccaccaccataatcaagctcatcacgacttccacggggatctccacgagtgcggtaaaggcgctcgcgttcgtcttcacgtcggtctgggtctctagcgcggggacggtcaaagtcacggtcccggctacgataacggtctccacgctcatcgcgacgatcacgagatggggaaataccgctgaccttgcggtaagttcgttcgcggtcggcctgtgccttgcgacggtctgcttcgtatgcatccatttccggggtccggttggtctggccgctgggtcctcgtcgttctcctcgcccactgcgatattcacgatcaccgcggtcataatcccgtcggcttccacggctttgagagtgtacctcacgctccctctctgcatcctcatctctttctttcaagcggcgaattgctttttcaaaggcagactcccgaatttcatcggactcaatggccttgtattcgtcgtatttctcaaggcgaggttggacttcagcccaggtgtcggtgacccggacaggcggctctaggcgcttgatacgagaacgcagtgcgtccacggcgcgacgctgttgacgatcggctgcatgcttttcatcctccgtacgtcgaactgccttgtcttggatgcgctggaaaatgagattgagaatctcagggtcaatcttggaggtgcgacggtcggcggacatgatagaattgaattcgtcaaacgtggtttcagtcgtaacttcaaatcgcttgtcctagaatcagtttgttaggacatatagtctttgcttggatccgagggaaacttacatccagaacatcgagcacgtcgttccgaggtcctcgcaaagcgcgttcttcttcctccaccatatcccagaacaaatcaagaggggtcgaaccaggctggcctaggatgccatgatatctggggtcatccttaatgatcgggcagatattcatccacttggtgcccgccttgatcttaccctgggatttgagctccttaaggagggccacgaattgctctcggttcttacgctcctttctggttctggctgccttgtgttgctggcgagcatcgttgaaagcccgctccagggacttgatatgattttcgaaggcaatcaaaatgtcagacttggttagggatttgaacttgtcatcggtttggaacttgctgtcagactgaatgatggcatgagcctcggaccaacgcgtgtatggctccaggttgagtgaatccataatggtcatcaactcatccatggcagccttgtgcgtgacaaattcttgctcggcgtgagccttcttgagttcgaggatgtactcatcgaaaagctggcgtctctcgtcttcctcattggtagacctgaaggtagtctccccctcaatgatcggtcgaatcgtcttccagcggctgtagtattttatttcaggatggcgcttcagcatagtgttgaagtccgcgcgaagcttggcgaatcgttctttcgcccgctccttttcctgcatgcgaacctggaccacgtatttctcgaaggctgccttgcggtctcgcggatccttaagagcccggtactgcgggtccttgatcgtagcgcgcattgtcgcgtcccaagtccaatcaggctgcacgttgtggcgcttgagcagcttcatgaaggcgctctccgcctcctcgagagtatgatagtcggggtccatctgggacttgtattctggagcagcgaccatgctgttcgtttcaaacgagccgtatccaccgcgtcggtcgttgtatccccgctcacctcggtcacctcgatcacctcggtcgaagtcttcacggtcacgttgctgcagttgcgagaaagaggctccgccggcgacaaatgaaggggcactgtgaaggaattggcattgagggaagttaagttggggaagcacttacgcgggggtcgcctggggggcaggcgcctgtgcgagcgcgtttttgtaaacttcaggcatctcccatgtgctctgcttagtttctgagtgataccagtatttgcgcccagcatccgtagtgtgctccttccatggttgattcgcgagagcaagctataaagaagtcagttaagcgcgtaacattttgcggtcaggtacgcacctcaaccggagtcatcaactcttgcggcttggtccattgtgtggctttggtctggatattgtaataataaacgcgtccttccgcattttgcgcctgctgccacagggcagaatttgggttgcggcttggatccattgtgaacggtgttgaagagactaacagagaagtgaaaacggagcttcctcaataatctccgcggctgtgcgcttttggcacttcgcgtctaccgtatcaacacttatcggttatctcctgagctctaaacagccactttattgactcctttgcgacatccgttgtcgcaatgcctggtctggagatcccaggtgaattcttgcgtcatgcaattcttgataccgtcgtgcttcatgctccagcatttgacattgagcgcgccctgagttcggccctagaggacggagctgatgatctcccctctgttctctcgtcaatcccccaacggtctctattgttctttggtatgcactttcaaaggatcagcagagtttgcgccttactcattaatagcaattagatgaatttttgcctgtccgtatcatcttgagactatctgattgctcagaaacgaccttgaaacactacctgccacgactcgaagtcaagctcgatgtctttgctgtcgatccagcagaatcagttggcgaaaacctcacgccaactcgcgatataatattctcaggaattgtcggtcgagatgaggatcccctagtagtcttcaatgaattcgaaggtgatgaaggcagtgggaatcatgtctatttggtttggaacatcgagactatactgcgtgagtgatttgaatctttggattgacatgaacgtcactaacttggttgatagggcgtccccgtattcgaatccaacatccgtcactcttattcattgcgtctgccagtctgaatccggctgacgctcgccgtcgagagaattcgggggatgactatctcccctcactcgtccccgcatcgaccaatatgctgcaatctctatccactgataaatctttcaatcataaagagcctttcctccccgcttccagactattgagggttgtaccgacaacatacgacgaagacccgatttacaatatccagcaacaacacggtcacccctttcgcgttgtgccagccgcaagcgcaaggattcgatactctcggttaagctcctacacggctataccgatgaccgtggccagtcttgactttgaggtcaccccttatctggcttgcgaggtctcctttgacaaagcgaatcttcacctgtccgagggaacgattgagtcgctttcagacacaccgggcctggctcttcctattacttgccgtccgcgagacgatgtgaccctcatgtataaacttacaccggagtatggcccagagaccaatccatcatctaccgcgttagtcagcacgctggacatatctctcgaggcagcaattcttgtggatgacgactgcaagccacgtatttctatgcagtggagaaccaacgtcgatttctcagtcgccctaaatccgaattttggggggcccagtccagcgctgcaaaggaccaaccgccctaccagtctatcggtgtcaacccaagtgggtgtgaaccctcatcgaagctcattgcgagaacgagcatattcggtcaccgacgtgggtatcacaatctcattctctggacctgttcgtgtgcaagtgggctgtgtcttctcttgggatgtttttattgtcaatcgatcaaacgctcctcgaaagtttgccttgatcgccatacccaagcggaaaagcgtggacccacgaggccatgttgctcggccttcatcgtcatctatcaccagccggaaagaggaccaagtggccgaggcggtaactgacgataatatcgtgcatgcgaggcaaaagagtgtggctggtcaggaagtggaactgatcagcttgagcacagacattcgcgtggggtgagtattctctactgtgttccttttcgtttccttctctaagctgacgttttattagccccctcctcccaggaacttgccattcgactgaactcaaactccttcccctagctacaggcccacttcatttggaggcggtccggcttgtagatgtgaacacgaacgaaacgactgatatccgagatcttccggacattttggcggatgatcagcctcgctctagttaagagcagcctaacactgtatatatatgacatagagctatagctactttcaaagtggcctgtccttaacaaattattttcctcttgccttttatggtgtgtttttaaggctgacaactcattcgagagactatatgcgaccccatatctagtttgtaccttttcattgcccggtatctcctgtttagtaactgaactgcgatcttgaaacgccaagcgcctcgaacggcgtgaaagcattactattgctccaatgaggcggtgttaaagaaagatagatagaactgttggaatcggctggaagatgaaatggagttatacaatacaatttatatccacgaagtcaatgtatacggggtaggtgtagagtaaatacaccgaggcagcaaggtatagttcaacgaatgtgattggtggaaggagatcacggggtaatcgactcggcgtcgtgactttgttagtcacaaaggcgggaatttggagaaggccagctaactacatagttatcttcttccctacatatcatcatagtaactgggattcccttctgaatattgggtattgggttcaatatccagcttctcaactttgcttttcaactgccccggtttctttggtctttgcgtcatactggcgcatttggttccttcccagaaatcttgcccatcactccgctcccagtcgccagaaccctccaacatgatctgctctgcgaagcggaaagtcctggatggactgaataagagatatatttacggtcgcgtggtatgcaccttcctaaagcctgacatatcgtcacctctcaatttgattacggctaaccctgtggtcattatcttcaagcctttattgcacacgataattttcctcgtcgagatggcagtagcagcacgccttgctaccaaattcaatacctattatgctgaaaggccaggtaagcctctttccgcctgttcccgcgggatcacagactgacatcactactgtaaatagtgctcacgaccatggtcaccaacgctgtaagcttgccgcgatattgatcaccaaagtttggactgacagctgactaaatggatgttacaggtgcttggtggtgttgccgataccgttgcgcagctgattacggccttccggacccgccgatcgcagacaagcggggacgatttcctatcgatcgagatccccgactttgacaagcacaagccctctgctgtaggggaatcgggatatgttcggagctcattgccgcctttcgattttgagcgtctgacgagattcatggcttatggcttcttcatggcgccgctgcagttccagtggttcggcttcttgtccagagcattcccactcactaagaagaacccgacggccccagctttcaagcgtgtcgcctttgaccagttaatttttgcgccatttggtatgatccgcctctagctactttgggatgtctttggaccggactgatttatctaggtctggtggtcttcttcacctacatgacgatcgccgagggtggtggtagaagggcattgacaaacaagttccgtgatgtctacctgcctaccctaaaggccaactttgtgctctggccggcagtgcagatcctaaatttccgtgtcgttcccattcagttccagatcgtaagtctcctaagttctccttgttaggatagaacccatactgacttctcaacccagccattcgtctcaaccgttggtattgcatggactgcatacctttctctgactaactcctccgaggagtcctaattgaacgctattcaacgcgaaatcatgataacgattcggggtgtagaatgcttgaagtacactctttcttatgtcaaattatttgggagtttcggttggtcagtctggctttcatgtacatggttgcccgcggacggggtttgcatttcaaaaggtcagattttgcacatttgggaataccaactcggggttttgctgttaactatttttgtgatttgacttgaatgcttcaggagaattccatgtttccgcttttcagcttttcaacccccattgtgcttcacatgatttcgttggactcggaaaacacgcaagcatgtacggagtagcgactatggaatcagtagaggtaatcttcccagaaattcccgaccccgaggctaaagagggcctttatggcccggccttccccgtatcaacgcgggcagctctgacatcagtcccgcgtcagcccgatcagttctccggggagagtcgggtacgggaaagtgaggtacctattttatagagataccttgtaaacaatgatggcatcatagtgcgaacaagtaccttattcggtggaatacatcacctgtaggtaccccgttgctacgggggtgccttttcaccggccttgccccaccaaaactgacccctccactctttaatgatcgcgagctcaccgtggcctgattaagttctttctccttcttcttcttcttcttcctttcttgcttcttttaccattgtcatatcattagccatccaaaatgtctctcgccaacaagctccccattactgatgtcgacctcaagggcaagcgtgtcttgatccgggtaagcttctagctcattgagcttcattactcgcagctcctaaccgctgactgaaacaggttgacttcaatgttcccctcgatgataacaagaacgttaccaaccctcagcgtatcgttggtgccctgcccaccatcaagtatgccatcgacaacggtgccaaggccgttgtgctcatgtctcacctcggccgccccaatggcaaggtcaaccccaagtacagcttgaagcccgttgttcccgtgcttgagaagcttctcggcaaggacgtcactttcgtcgacgactgcgttggtccccagactgaggagaccgtgaacaaggcttccggtggccaggtcattctgcttgagaacctccgtttccatgctgaggaggagggcagctctaaggacgctgagggcaataaggtcaaggccgacaaggccgatgttgatgcattccgcaagggcctcactgccctcggtgacgtttacgtcagtatgtaacaccacgactctattactatttcttgtcgttcatttatctctaacatcaatccagacgatgctttcggtaccgcacaccgcgctcacagctccatggtcggcgtggacctaccccagaaggctgccggtttcctcatgaagaaggagctggagtacttcgccaaggctcttgagaaccctgcgcgccccttcctcgccatcctcggtggtgccaaggtgtctgacaagatcctgctgattgacaacctcctgcctaaggttaacagcctcatcatcaccggtggcatggccttcaccttcaagaagactcttgagaacgtcaagatcggcaacagtctcttcgacgaggccggcagcaagttagtcggcgagattgtcgagaaggccaagaagtacaatgtcgagatcgtcctccccgttgactacgtcaccgccgataagttctctgccgacgccaccgttggtgcggctactgacgctaccggtatccccgacggcttcatgggtctggatgttggccccgagagtgtcaagctctaccagaagaccattgccgaggccaagaccatcctctggaacggcccccccggtgtcttcgagctcaagcccttcgccaagggtaccgaggctaccctcgatgccgctatcaaggctgccgagtccggttccatcgtcatcatcggtggcggtgataccgctaccgtggccgccaagtacaaggtcgaggacaagatctctcacgtttcgaccggtggcggtgcctcgctcgagcttctcgaaggcaaggagctgcctggtgttactgctctgtctagtaagtaaatgatgaaaaataggtggtgaagggagagtctacatcggctctccttttgtcctgcatgtttatgaaactgtaatgtatacagccaatgaatttccttttaattacaaactcattttccaaaagaggtctggattgtggtcttagatcagataactaagtgttgtgcttaggtacgaaaccgaagctttagctacgacgtcaagagacctcccgtggtcaattctcatgtataaggatgagaggaaattcctacggtaaataaataggaccgcaacgccatagtgtcatgaatatggttgaaccatgccaatcccattcacaactccacctcgcaacgcaactccaactgatacttccgttcatcttcctacataatatcattttaggcttgcgcagaatcataagctttgatattagtggaacttcatgataatcccgaaaccaagatctgcgctgagtaatgaatcgtaaaaataagtcaaaaggaccgtgtctcatttcctccccgacaagctcccgaaaagttcctgacaaatgcatgtggcaataaagcttttgaatcctcccattggttccaaagacaggggggtataatgtgcgagatgaaatggccagccaactcgataatgaacccatcccgaaacccgacgccggggttatttctttttcgtgcgcttgtgcaggttcgtccagtttaagccgatgcttcgactttcttcaattcttccctggatgaggtgatggatgttagtgggtgcggtgaaagaggggaaggcgggagctttggcggggatgggggtgcgggcttcggtggtggttttggttcaaagatgaaagagactttgtggacaagaagcatagcataaagagtatacagagaatcgggaagtattgggaaaggcaaactcactggagctgctttgagaagtcctccgcggcatcatcgtcatcccagctctcttcccacaggtgctcgctaccgtcatttgctgtcgagccattggcctgctcggcttcttcttggggccagtctgtgtgtcgtagagttagcttcgttgctgcagggaagcgcttgagtgcttggtcgataccttcaacggggaaatcctcgaactcgtcgtcttcctccaagacttggggcttcgcttgtggtgcgggctgctctgtggcatcggccttctgggtagttgggtttgacattgtgggagatgtgatagacgggggagatcgaaaggtagataggtggagatgtggacgtggatgtggcagctttgaggtcggaggtcggaggtttgacttagtaagaccgcgataaggcgataacgatgatgtagctgggagagaacctcggaaaacagcacagcgttgttgatttaaatggaaaaaaagaaagaaatgaatgagtgactccgaagaagagaatagaagagaatattagaaatacaaaagagtattatgttatgaaatagagcaaaaaataaccgatcgatgtagaattcgccttctataagaaattgcccacacggagctaccggcgaaaagaatccatgggaagagcctcagcactggggacatgctatattacagcttccccctccccctcgaccttccttctccacctccccacctctttctgtgtcttttcccttttctctttgttattctcttgtatcagtgatgttctcgaccgttgagtttccgcacagttgacatattgacattcctcccgatccggcgctctctcttttcggcttgatcggattgtcctgactgagaccatcgtggattgtgtccccattgaaaatttcattcttcatactcactgccagcggttttcgtcatgttgcgtgtcgggtcctggttgtacggcaagaagccggcgcagtctgtggactcaaaggttgagttgaaagactgtgagtggcgatacactctaggaaagccatgatgattattatgttgcatactgaccgccctcttctgagctagtgcatgatgcgctgacaggtatgtcttatgggaaatgtgcgcccctttagataccgactaatgcgatgaaactagctgcaacgctgattctcaatgatgatgttgatggcgcagagagtggtctctccacgggaacttcatcctttcacaatgtgggtatcataaatacaagctatgacgtagcacataccttgaggaaaggcgctgactcctgatcgagtacatagctgggtaaaggcgtggtcgcgtttgtccgggcaacattagggttcgagcaggagattatgcgacaaggtccattgctctttctatcttctaaatccacattttctgacaatccgcagcatccgagcgcctctatgaagcagaaaccagcgcggccaacgatcaaacccggtcccagcaaaacgcccaagcacccaatgcttttcactccgatatctatgctgccggtaccgaatacgcgttgtgccaagcaatcgcccaattgatgagtgcagtggttggggtgctgaatgaaagcctgacagaaagtatcaaagcgttctaccgactgaggaaggcttatatcgcactcgatgcgatcatgaagatggaagagaagtttatggagcagagggatatacgcaaagttttacggcccactgcgagtgatctctcaagctcgagcgctgcatgcccagacacgaagtcggagtcgtccagtcttctatcgaaaaagagcgcgaaaatggctaacatcgagaaatccgagcttaattcctcaatgaattcactggcgatctcatccagggcggtatctccagatgtttcaactccttccacacttgcgaagcatatccaccaagaccccgactcggatatcttcaagaatgaaatcgatgtttttgtgcactctggttccaatttctgctttggtattcttcttctactgatctctatggttccaccggcgttcagcaaacttctttccattattggcttccacggtgacaagcaacgagggctgagaatgctctggcaagccagcaagttccacaaccttatcggtgccatggctgctttggcactgctggggtattacaatggctttgtccgctactgcgatattatgcccgacccaactcctggtggatccgacgttgagggatacccgcaggagaggctggctgcgttgctggcggagatgcggttccggttccccaacagtcaactttggctgctcgaagaatcgcggatgttaggcgcgaacaaaaagctggacagtgctctggaagtgttgtccacggacaagaagagcccgctcaagcaggtagaggggttgtgcgtgtttgagaagagcttgaacgcattgtttctccacagatataatgtctgtgctgaagcattcattgaggtataaatcttatctggagatttttgaaacatcaagctaatcctttcagtgcgtggaactcaatacgtggtctcgttcattgtattactacattgccggatcgtgtcatgttgtcctgtaccggcaatcactcgacgacccaaagcttgcagcggaacatgctaaaaaagccaccatgtacatgcggaaggcacccgaattcgcggggaaaaagcgatttatggcccgacaactgccgtttgatatctttgtgactcggaaaattgccaaatgggaggcgcgcgccaaagaatggaacgtatctctggtggatgcgattggagtggacccggttgaagaaatgatctttttctggaacggacacagtcgcatgaccaacgagcaactgcaggagtcgttgacccggctggaatggtgcgaaagcgaaaagaacaagatgtggtctcgtgagggaagcgaagaaaaggcgatcctggagcttctccgggctgctgtttttcgatccctgtacagacacgaagaggcgaaaaagatccttttgacctgcgtcttgaaccacgagaagtctgtattcaagggccacctgaaggatgactgggtccacccagtggcgcatttcgaaatggccgccaacctctggatgcagcgtcctacataccaggccctgcatgggattacttcccccgaggcgtcggaggaagcgtccgcggaatctagggagacgatagagatcgagaggaagcaggtatccgagtgcaagggatacctcgacttcgctgctcgctgggagagctatgagctcgacgctcgtattggactcaaggttactgcggcgatggaagcaattaacaagtggcagagcattcatgcggaagtctaatggttattgtgtttgttcaatccttgggcagcgcattgttcatagctgcccaggataccttgtgtagcatacacacatagagtacgagtagatgttaggattagatttaacgaagttcattttacgtctctttttccatccttttctcctctttcaacatcagcacaatggcaacctcaccgtttaattcccccgatcaccgatctatgcaacgtcaatgcttgaatgtcattggccacaaggagctccactatgcgatagcactcggcactatggccaccgacgccgagtctctcatttccccgtccgcaaatgataagtctcggtgcttagatggtgatgccgagatttcatgaaagccgttgaactctccccaaagaacttcccgttagaattggagattagcaacctgacatattccgaacgagttctcggataacacggcttttgccatcggaggtccgaccaaaagtccccagagtcttgaagaaaacgaataaaacgctctgagatgtccgatatttctcagccttaccgttgtcatttctccgcttgacaactccgttatatccacttattatctccgagaattatttccccccgacttttctacggacttttccgagtctacttcatatatcttgtttcgcacattctccctctcttagctctagcgctggtcctgcgacacttcggtcaatgatccgtaataatggtcgaacggacagaacatgactgtcgcactagcgaatctagcgacgatatcgaaccgcatcgcagcgacgaggcagatggaatcggagcattggagaagcaaagtactgcggcatcgggttattcagcctttgaacaacagcgcggacagtcaatagtctcgcgcattcggagtctcgaggccggtcagacggcgaaattcactcatccactcagccataccaagacaggtcctgatgtcatcgtggatttcgaaggaccggatgatccttacaggccattgaactgggatttcaggaagaaggctatcacgacggtgctgtatggattaactactatgggtatgtcggggaaatgatgaattgtggggaatgacgctaatcgccgttatcaatctaggtgcgacgtgggcgagttcaatgtatgtccattttcttttcgtcctcacagtttatacattattaaactaacagtattagctactcaaccggccaggcacagatcagcgaggaattcggcatctcaaatgaggtcgctacactcggcacctcattgcttttgttcggcctgggattgggcccgctgatctgggcacctctgtctgagctatatgggcgcaaaacggcagttttaccgccatactttctcgcggccatcttttccttcgcgacagccaccgccaaagatgtgcagactattatgatcactagatttttcacggggttcttcggctcggcccctgttaccaacaccggcggtgtcctgagtgatatctggagccccgagcagcgtggagctgccattgtcggctatgccatggccgtggtcggtgggcctgttattgggcctattgcgggtggtgccatcgtccagagcaatctgggatggcgctggactgaatatgtgtgtcttccacgcttcgttgaagttgaaaccatatgctaatatctactagatcactggtatcatgatgctattcttcctaaccatggaccttctcttcgtcgacgagagctatccaccagttctattagtctacaaggcacaacgactccgcttcgaaaccggcaactgggcccttcatgcacgccacgaagaatgggacgtgaccctcaaagaaatatgcaacaagtacctggtccggcccttccaactcctcgcaaccccaatctgctttctcgtcgccctctacgcatcattcgtctacggcatcctctatctcagtctcgcagccttcccaatcgtcttccaggaaatccgcggctggaaccaagtcgtcggcgcccttcccttcctcgcctacctagtcggcattatgatgggcgggtgcatcaacctcgccaaccagaaattttacatcaagcgcttcaaagcgaacaacaaccgccccgtcccggaagctcgtctcccgcccatgatgctcggctctgtgctcttcgccggcggtatgttcgtcttcggttggacaagcgcaaaacacttccactggatttgcccgaacatcggtgcggtcatgatgggcttcggctttttcaccatcttccaggctgctcttaactacctcattgatacattccagaaatactccgctagcgcgatcgctgcgaacactttcctgcgctctatgttcgcgggctgtttcccgctctttacgcgcgctatgttccataatcttggcgttccttgggctgctagcgtgctaggcttcatttccgttgctctcattcccattccgtatctattctacaggtacgggaagcggatccgagcgcgcgggatatggtcgcgagattcggtttaatttttttgcgaattcattgtacatgtcttcctattaaatgggttatgcgcacatttgatcgcagcctagttggatacacacgcgcatgccttgcatttgatatttgataccctccgagcgcctccgagtttcagccatctcagattgacccctacaagcctattataccaggatgtggtctaaaagtcctacttcactactttttctacaggcataattttcaatagacaattttccgcgtattagagtataacaaagaagcagcaagcacaaaaataacaggttgaacaggaagaaaaatgtaaagagagaatatagtgagtaaaggcgattgaatgccgtatgtacccaatccagaagacaaaaagccaaagccacaagaatatggcgaagacaaccagaatataaaacatgcaacataaacactgagagaaagaaatagcaaaggaaagggtttttggtgtatcctttttttttttttttgtgattaacacctgtttttgcttttttttgtttttctccgcggattccagctcgatcatctgatatcaagctcgagtactgactgtgtttcgtccggtcagcttccgcgctatggtcatcgccttcgaccatgtcttcttcttttcgatgcgagcgacaggatcaggcaatgcagcaccggtagcaagaagctctgctgggatatcatcctggtgcttggcgttgtgcaaagccagaacggccatttggcccaagaaagaggggtgctcaataaggtcctctagacggaccttgagaccatcttgctcaagaagccaggtaagctgagccaggttgaagacgtcaccgcccagatcaaagaatgacgaatccagctggaaggcggattgctgggttagcttgtcatcagcgtctgggtcggaagccacggtggtgcggctgggcaggacctgatgccacgagcgagacagaatgtccgaatgcacaagcagctctgcgatggagcgcgacttgaggtgtgcgctgaggaagtgctcgtctgaggctcgggacaggtcatcgattgtctgcggtggtagagagcgcagcatgctcgcggatggcagcgaggctgtcgggttggcgacgagggattgcgcaatctcacaggccatgtcgagaaccttggatgcgaatgatggcatcacaggtcccttttcggagtagcccagagtgacatccaagcctcgttcaccggaggggcgtgacaccatggtgagatcagctaggttgtcattgacgccgacaccacccatacggtacttgttgttgtcaagctccatggttccttcgtagtcgacgttctggtggaagactgaggtagtgaagtatgtccagtcaggccagtcggtacattgcttgatgatctcacggaagcccagagactcgaaaggcatgttggagacttgctggtcctgaaggtagcggaagatatcgacagcggtccatttctcgtcgagcttcacgcgcaccgggatgacattgacacaagggccaacagtgctctcaatgccgggcactgtagcgttgcgaccgctgatagtcagaccaaaaacaacatcggactgagcagtcagcttagcaagagttagggcccaggcagcttgcatgacggttgcgatggtgacatttccgagagcgatgggcgaaatctcaatctttctgtgaatctcggtgaatgccccaacgttctggaacatactggtgccctttctgcggacgacctgggtcatttgagagcctttgagaagatcggaccagtggcgataatggtctggggtgattgttcctggcaacagtcgcaagtaaccagcaaagggagtcaccggaggcagcggcgtgccttcatatccgtgcttaatggcagccatgatcttcggcaagcatactccatcgtattgagtgtgagagaggcggaccaagatacgatgttggtcgctgcccttcttcttgacaacgtagaactgcacgtactgctcgccttcgcgcggtccgtattcgcgatctctctgttggagggtcatggtgaattcatcaagagcgcggtcggtctcgtaaacaaagatgctgggacggatcttgcgcagcacgacctggaagaattggtcatggaagcacacgaagactgtgcgcaggatatcaaaggccgcgacaaccttcaagcaactctcgcggaggcgtctcaggtccaatggaccattgccttccaaatagaagtagttaagcatccatcgggacttgaagagagttgccgttagagacatcgcctggaagtcggtgacaggaagtacgtccgcgatgccacccttgaaaacaccaatcttgggacatatgccgctctgcacagcggcatcgtcgatgcaggacggcctgagaatctctaggctctcggtagaggggctgagccctagtgtcgttggcgtgatattgagtaaatcactatcagcctccctggggccgccagacttgagatcggcattcagcatttgctgagtaacattcgcagctcgcactgttgctagcatgtcctcgaagacaggattgttgaagacatctgcaacagtaagaaccaggccctcttcacgagcggcgctgaccatcttcatggcggtgatgctgtcaccccccaacttgaagaagctgtcctggtgtctcaccacgttgggcgagagaccaagagctgtgctccaaagactccacaatttactttccacctcggccaaaatcccatcctcactggaacgggaagccaccgaacaaatacccgaatcatctgctccttgtatacctaactggtacggcgagtcggctataggatcagggtgaccaccatagcttgacaactcttccgagtgaatgggaggcaccgtcagctttccttctctcaacatccgactaataatctcatgaacacgatcatcaataattttctgaatagcactgctgtcaatcgcatctccggtcgactttgccttgtcagccagagtggtttgggagtgatcccaatccagtgactcgggctcagcctcggaagcgaatgtggactgcgacagagtcgcagcgggagattcaatgaagctagtgaacaccttggcgacggtgtcagccagagcctgggcctcctcgtcagacacaatatcgttccagtatctcaaaagaatgccctcctggcctcgggcaatctcaacattcacggtgaccgcatactgtattcagttagtagttgaacaaagcattgatagggcttatacttacttcgctcggatcatgtgcatgctgaagatcgaaggtcaatcccttctccttaggacccgcaacggagtgattctggattgacaaggtagtattgaagagcgactgtccttgccaaccaagctcatgttggatgctggccagagagcagctttggtggggaatgcagcggatataatcatcctgaacattcttggatacatccataagagtttgttggtcggagaactgaactcgacagcagagcatattaataaagattccaaccatgtcctggatgccattgacaggggcatcccgaccggcagaaaggtatccgaaacacacgtcatctgagccggtgaactgtcgcaggacgagcgcccaggcggacagagtcaagttggcaagtgtgacagagctgcgctcgcagaacttgagcagctcagggaatcgctcgaagttcatcatgacacccttgagttctctcttggcttcgaacacagccgacggcgcgaggtggcatgggtgaactccaccaaggtattgtttccagtgactaagtgcatcactctggctctgggttctgatgaacttgatgtagtcgctgaagcgaggtcctgaaccctcagcaatctttcgctcgtaggcaagagtcatgtcacggaggagtacatccaccgatccaccatcgataatggcatggttgatctccagcttgaggatcacacgtccggtgtttgttttgcaaacagtcatttggtgagaaagcttcgattggcgcattgcgtttctggcatgaagagagatagcagccaacttctcctctacctgcgagtcatgacattccacgcggaggatattatcggaaaggttcttgagcaccagttgatcgaaagatccaccagtgtagttgctgtcaacgaaaattgttcgcagcacaggatgacggtcgacgagggtttgccaggcgcgggcgactccttcggcatcaaccttgctagatttggcgtctttgatctcaaacacagtatggaacatgtaggcgttgggatcgcggagctgactgagcaagaggccctcctgcatgggagagcagggatatatgtcctcgacctcatccttgttccgaatgccggccttgcggaaggtgctggctgtgagcagctggaggccgtgatagttgatggggaggagggggtagtcgctgagagtaggctcgggggtagccgttttcagtgtgaggatatccttctcgagggtttgcttgcactggacaatccagcggcggattgagccctcatgctgcattttgtggttgtaggtgaaagcaacattgaggcggtctttgatcacaatagcagatacttcgaagagtgcaaaccgagcagtctcagggcccatatcacctgcgatagcaaagtctgagctgtcgaagacagtaccgtggtgatggaacaaggaatcggctcgctcaagttgctgcattttacccaggtaattgaaaaggatttccaatgggacagggaaatcagtaccctggccctgtagaagacttttcgcgaagtaaggacggccgttgtctgcgatcttacgcctggtgtctttgacacgcttgataatgtcgttgagggcaccttctagtgtcagctttttgtcggtaagatcaggtatggcaaacttacgagcttctgaatgcacttgcaaaggcgccatcgtggtaaaccagccaactgttcgcgaaagatcaatgtcggcttcccagggttctcttccatgtccttcattgtagatagtcggcaccttgcgatcggtgaaagtgcgaccgaaggaatgaatgatggcagacagcaagatgtcaacagtgtctgtgcggaagacactgtggcagccgtcaaggataaattgggtggtatcctcactcaacgtgaaggattccatcttgatatctccataaacattgggtaagtcttgcatgccccagtaaagcaagtccggcttctccggggtgaaaggcagagcaatcgacgcatcgtgcgtcttggctctctccgtctgcatggcacaccagctttggaaagacaatgccttctcgagtgaaagagatccagagacaacgagctcttcgagatcctggaggacgatgcgccatgagaccatatcaatgcagagatggtgagcgacgaggaataacacctggccaccagcgcgaaggttaaagaggtcggctgccaggataggcccattgagaggatccagacaattttgactgtcagcaatcttcggaaccatcgctcgggtatcgcccacagagtgaacgcggaatcggaaagattcatcgacctcctgtgaggttgagttagaacatgttgaatgatgattttgtattgagcttaccgctgcagttttctgttgccaggtgccgtcgctagatgtgctgaagcgtgcgcggaacatggcatgctggccgataacagccttaatagcgcgcttgagcacctcgccctcacaacggcgagtgatgcgaacagtgatgctctggttgaaacgagcggctcccttgaaagagtctgagcactggaagtagagtctctggacgggcgaaagcgcaaatccttcaccagacttctcttcacgccgagagacaggtgccttagaactggcggtttgagcaagttccttcacagatctgctctgcaagatgtcgtggagtgtgagaacaagtccctgcttgcgggcgcgggaaatgacagccattccagtaatgctgtcaccgcctgtgaggaccggttagtatgttgactgtttcgagaggatgggatacttgcccaagctgacgaaagagcgatcgacattgaccttctgtgtggagatattcagaacctgagcgaatatttcgcggacgatgttgagagattcattcttctcttccttttcttgcggcttctcttcggtcttgccacgcttgatacgatcgtaatcggccataatacgctcgtaggaggcatcatcaatgtcctcaatccaagcggtgatcttcttccggtcgagctttccagaaactagcatgggaagcttcttgacgagagcccacgtctggggaaccatgtaaatggggagctggttctcaagattcttctgcacttcgaccagctcgttgtaggcatgacgctcaagctcatcctcatcaacaagctcgcaaggcttgtcggagattagcgaagtatcggctgcgacactgttcaacgacatgacagtaaccaggcgctgcttgagagggccattcttggcgagaacgacgacagcatgccgagtaagagcatcctcagaaaggcgatgttcaatctcacccagctccatccgttggccgtgcaacttgacctggtgatccttccggctgatgtactgaatggaaccatcagggttgtagtagcaaagatcgccagtcttgtagattcggcgaggacccgggactgtgggcgtgaagtccttggtccaggcagggtcagtggtgaatgcttctgcgtttttctcgggatttttgagatactccctagccaaaggagtgccttcgagtgcaagttcaccgactgcgcccaggggagtcagccgatcgtggttgtcgggatcaacaatccaggtaagagtgctgggaataccgtaaccgatacgcccgggatcacgattggtggccacggcattatcgaccacagcaaagacacacgtctcggtcggtccgtacccgttcatgaggtgaacagagttggcccacttggtgatgacttcattggacatcttctcaccaccacaaacgaggtgcttaagggaaggcactgaggatggctcgattatactggcaattgagggggtgaggaaagtccaagtgacattgagtcgacggattgcgccggcaacatcgttgagacggtcgtcctcgctgggcacacagatggtacctccgagcataagtattgcaagagtctccatgacagcagcatcgaaagtgagagaggcgaattggaatactctggaggtctcatccatgcgaacccacggcgcgaatgccatgatactgctgactacgttgcggtgctcgacaattattcccttggcgcgaccggtgctgccagaggtaaatagagcgtaagccatattggagggtttgacttcagcgcggcgacgggcagaagacttgagggcaccgtaggccttgatggtctccttgctgatggggataacagtcttcatcactcggctgtagcggtttgtatagttgggagtgcaaagtatcatgttggcaccaacgtctgcgaggatttcctcatgtcgcgaggtaggatgggacggatccaaaggcacgtacccaccaccagcaatgagaatactgatgagcgtgaccattgcccaagccgacttgtccaggcagactggaacaaatacctctgggccaactccgcgagagaccagatagttggcaaagccagatgcgagatcccagaattctctgtaggtgaggtcgccatcccaggcacacacagcctgggcgtttggggtctcgtcggccttctcacgaatgaaatcttggacggtccgttccacagtgagcgggacacgttggttccacgtaccgatttcaaccttgtcttcagggctaatgacctccaagtcgccgagcttgctcgtgctgttcttgggcaaggcaatcaattgctggagaacatgggcaaattgttcagtgatacgcttagtctgccatccattgatcacaagctcatcatgatgaacagtgaacgaaatatttgtcttggtaataccacattccacgacaagagggtgtgtgaagaaatcttcgcttgtttcacgtttctcgtcgatccacattttattatcaagctcaccgtcacctggttggattacaagcaggttcttgaaatcgcagcccgtggcagtgtctttgctgagctggcggacatgttgaagaccagagtgtaagtgtggaatcatctcggtagtagactggtggatcttctgcaagtattgcatagtcaacatggtattgtcaacctggacacgagtggggacggtggtcaggacaggaccagcaatttccgcaacaccgggaagatcgatatttctgcccgacaaagtctcgccgaagcagacatcaccagacgccgtgtgggtagcaacgacgattgcccatgcagcgcggaggagcacagggatcgtgaagtcaacgctattgcgagtgcgggaagccttgatgctgtggtgctgagtgttgccagcacgcattgcatcaggcactgcactcttgttatgagggaaaggactgctcgaaaggtcgctcaaataagacttccagaatttgtcagactcttccatatcctttttcaccaggtattcaatgaaaagactgtaaggagtgccagcgcgtttgttctgcgaggcaaagtagttctcctcaaccttgcggaataccaaaggaatactccagccgtcataaagggcatgatgaacagaccacacaaagtagctatcagaggagccacgagggtgcaccatggcgtaaccggtcagagatgctccattgtgctttggtagatgaaggatgtcgttggggaggtcgtcgaacgactctgcttcgacccaggagatagggccgtccttaaggacaacttgagcgaagttcatggcttcggtatggacaatgcgagtgcgaaggatatccaagtctgccacggtttgttgccaggcttgtttgaatttagcaacatcaatgccagcagcaagacggaacgagggctgagcaacataagcaccgtgttgcttgatagatagcgtcaaaaggccctcctgtacggcactgcatggataaatatcgctgatgaggtccttggacacttcgcagttatcagtcacttcatccatcaagttctcgaggtagactccagagggcagcaatgagaacgccttgacgttctctttcttaacctcagcggctccattagacacgacgcaggtcttggccatgtcgatcaagattggggagttgaagatgctcgagacggtaagtgcgataccgtctgcttgagcagcaccgaccaggttcatggcggacaaggaatcaccacccagaccgaaaaagctgtcatcggcggtgacagacccggcttcaagctcgaggatcttttccacaagtgccacaagcttgatctctaggccggtggccgaggaagcctcccttctgtcagaggtgttgaaggtaatgtaagacttcagagtatccttggacaacgtctgcaccatggcccgcagtcttcggcggtcaatcttcccggaggaggtgaagggcaagttgcggatggggaagaagagtcggggcatcatgctctgaggcagaagctcgggtagagagcccttcaacttctgaatggcatccatgttagacacagagataggcagtagcaggggatcggctccagaaaccgtggggacaaattgatcgctgctgccgccgttggagtccggatcatgcacggtgaagaacgcggcgagcccctttgcgatggtgcgttcctcgggaacaacaacatcaacagcgacctgagagtcctcgggtaggcagcgaagacattgctgttcgatctcctcgagttcgatgcgctggccattgaatttgatctgagtgtctttgcgggagatgaaggctagactgccatcgctgttgtagcgaacaagatcaccagtccggtacatacgatcatttcgcttgaacacaccctggaagccggcatgacggttccaaacaggattctcgaagaaagaggccttcgtcttctcctcgttcgcaaggtatccacgggcaatgttgcttccttcgaggatcaactcgccaacagcaccaacggggagaagtcggttggaattgttcggatccacgatccagactctgcagtttgaggcctttccaatagatgtgggatcatcattgacacgcttgccattccaatcaaccttgacaccagctgtggcaacgacagtggcttcggagggaccataggcattgatgacgcaccggtctccccagcggtcgatatggttagcgggcatcttctcaccacctgtgatgatgaccttcaacgtgggaacgttcttcggctctaaggtattgacaatggcgggaggtgccgtgatgaaggtggcttccatacgacggatggcaccacccaagttgttcatgcgttcctcctcactgggaatacagacacaaccaccagtcatgagaaccatcatgatctccagaacgctgacatcaaacgtgtagttagaaaattgcaaagcgcgtgttgtaggggtcatgtgcagcgtatcgatcatcgcgatcgcggtggtgctaagggcagtatgctcgacaacagtcgccttcggctttccagttgtaccagaggtaaagatagcatatgcagcactgttaggggtagggcgagcaccaggcaaagccaaaggcgagtcgggaagttgggagattgaagtctggcagacggcaaacgatttcgcgcagagcttcgaaactttggtgtggacagaagatgagcacaagacaagatgagtaccaatttcgtcaatgagcatcttcagtcgagaatcggggtgggatgggtcaatcgagacgaaagctccacccgccttgagaacagccatctgggcaactacagcccaagcggacttttcgaagcacaacaccacgaaggcttcgggcttaaccccaagactggagagatggcgagccaagcgactggaaacaatttcaagctgcccataagtgaaattcttgtcccaagagcaaatggcttccgcacgagggtgaagcagcgcctgttgctgaatgagctcgtcggcgcacttctccaccctaggaggggatgcggcattccaatcgcggatttggcgaactgagcgctcagtgaatacattgatatctccgattgtgcggtcacggaggttgtgagcgatcaaatcatccaagacttggtcaaacatgtccatgacatggttgacctggaaggaggaaagggtttctgaggagtaattgaagtggatctcggcgtacgaatgcgagacttcagcttcaaccagaattttgtaagcagtggatgtgcttggctcacgggtacttcctttgggaagattggaagctatgcgataggaaagggaggtattgaagagggttgtatcatcgagcccaagctggtgtttgacggcgtctaacacagcgacgtttaatgcactgttctcggagtctgtctttgctttttgaagagtctcttgcagcttttgctcattctgcacgaggaagcgacaggtggcaactccctcatccgccagtttcgtgtccaaagctgaggcagaatacccaaagcacacgtcgtctgagccggtgtaccaacggagcacaacggcccaggtaaactggaaaagagtttccacaggaatgccaaacaatctgctgaaggcatgaatgttggctgtctgtttgctgagcgtgcgggtggagcggccattgtcgcttgtcgcatgggaaaggggcgggaaaacgcagggctcaacatcggcgagatactccttccagaaagcgacgttggccccggaaagacttgcatgtcgtgaatcccgattaccagccttggatccgttccaacgcttgatgtcgaaagcctcgaaagcattgatcgaaagcgcctgggtttcgattctgagggcctggcggtttagctttccagaaacggtgaaggggagggaggatatagggatgtaaaaactcggaaccttactaccaggaagactagtgctcagattggcgtgcaggctatatacggcctctttcagctcaggtgtcgtggactggaggacgcgatccccaaaagtgcctgttgtggtatccgaagaaaccacaaaagcgacgagggcattggtcttcacgttgtcacgttgcagcggaacgctctccacaacgcacttcctcttgttgcctaggaaggaatcaatgcgcgcctgagtctgaattagctcgctagccaaggcggatccattcttatcgttctttcggccgaggaaaacaagggagccatcagacttgtaccgaacaagatctccggtcttgaataagcgatgttcatcgccttctagttgtccacaaagccaggaagcgtcgttgaaaaagtcacagctctctacagactggtcgtcaaggtatccccgagcaacaacaggtccctcgagtaccaattctccaacactgccgattggaacaaggcaattgtggttcgaggaatcaaccacccacgaaacacaagaggtgctctttccaatcaggccagcctcgttgtcgtcctgggaacagaacacgtggaaggaggcagccgagctctcgcatgttccatacaaaacctgcagttggagatcatcggtctgccagtggtccaggacactctgaggaacgacttcaccgcccagggcaatcgatcgcagtcccggaacatccttgggagagaaaaagcttgcggctgttggggtgatgctagcaacattaacatggagggcattgatagaggtggccaagttggcggggtcaatatcagccgggatgcaaaggcaaccaccccacatgaaagtgccaaatgcctcaacaataaatgcatcggatgtgtgaggtgcaaattgcagggtcctggagacatcggcaatcgccatggtggtagcgaatgcctcggctcgagtcatgacagttgaatggtcaaggacgacactcttggccgaaccagcggttccagcagtcatagcgacgtacacgatgtcggatgattgtgccacggggttgagaacctcgtcggcgaggtattcgaggagagactcgcttacagggatgacgtacggtacagcatcctcgagaacctgggccttctccggggaagccagagcgacttgcacagcgttgtcgacaatccaattctcaacaagagccaaactctggggtgtatcaactggaatacagccaccaccggctttcatgattgccagtgtggagactatgttccacacagacttctcgaagcagatagggatcagggtgccaggaccaacaccgaatgtgacaaggtaggttgccaaacgagaggagaattgatccaacttcgagtaagttaagttgccatcccaagcggtgacagccaacgcatcggggagcttcttcgccatctcttgcacaacctgatgagcgcacttctcaaaaggcttgggagtcttgctgttccacgccatgatctgggtgcggttgtcgtcgctcaagctgtctagctggcggatttcaccgtcaatgttcgacacgacgttctcaaggcaacggagataggtattggccacattggcagcctgtgaatcagacaggttcgtggtccagtagttgaggtcaattcgagcagtggtatccatggcctcaatgttgatgaaaaccgggaactcggcgggatcatggattgagccaacctcaacacactcaatgtcactgctgacagcatccttggaactaggaagccggcggtaggagacaccggaattgaacaaattcgtgtcagacagcttcaaagcatgttggatatcaatgagcgaagtgtgtcggtaaggaagactttccatgtagtcgttctgtatttgatgcagtacatcactgagcttcgcgttatcaggaaccttcatgcggcaaactagaaggttgataactggtccaatgacccactggacgccctcagcagagacatcacgcagagatgccatgtagctgaaggagacatcttcggatccacagaaggcgcggagagtgaggccccacgcggcattgaagacatttgcgagagtgattccgcgcgtctcacaaacagtttggagttcactgagcgcgccgaagttgactggaatggaccgaagtgcctttggcgattgttggccgtcagtgagggcagggaagtggcacggcttggcttggtccaagtacgagcgccagtaattgatgctagcttcctttggtgcatcctggaggtactgaatatagtccttgaacaaaggctgagggctttcctcgagtctgccagcgtatgcgagctgcaggtgacggaggatgattgagatagagttaccgtccatcgcagcatggctaatctcaaggcgagcaaacaaccttccagcgggtgtctggcaaatagtgaagcgatacgctggttctggctcgctgtaatccttgggatcctccttgtcaaaggtggcaatcacatcatcttccgatgaagactgcaaaaagataggagtaacatcatatctcttcagtacgacttggcagaaggggtcccgaggagtgaggttctcaacgaagatggtgcggaacatcgcatgatgagaaacgacctgctgccatgcattgatcaagcgatcaaggtttggctcgctagatccggtggcccgaatttcaaaggtgtcgtggacagcgtagtaggagctatctcgcttgcgaccaaggaggataccctgctgcatgcgagaacaagggtagatatcttcaacaagatcaggggactcgatacccagagcaggcaacttctcattgagcaatttgtccaaggtaggatagctcaacgacaacatggggaacgagctgagagtcaatcgtggctcgagggtgggaagctgctcggagagacttataagcagcttctgacattcggaaacccattggtgaatacggtcctggtgttgcataaacctgttgaaggagaagttgaatcgaactttgccggccacgaccatcgcagagatctcaaacagaccaaagcggggagtatcagcaccaaagtctgcggcaccgcctccttgaccagcctctccggccatttgatcaacaagctggaagagaccatctgtcctctgtagatctcggtgttgtccgacgtagttgaacgacatctcgaaggggtgggggtgctccgactctcgatttccctcggctggcagaacgcggctggcgaaatctgcgcgaccattatccgagacacgacggcggagatctttcacctgcatgagggtatcaacggggttgtcggaattgtaggcagagacgaagattgggtgcagaatggtgaaccatccgacagtatgcgagatatcaatggatggatcccagacttctcgtccgtgaccctcattgtagatagttggaagagaacgatcggggaaggctcggccaaatgagtgaagcatagctgccaggaagagatcaatcggctcggtgccgagagctttgttacattccagcagaattgcattggtgtgggcagggtcgatctcgaacgaggcacaatccacattaccatatgtagtttgagtgtccttcagtccccagtagccaaagtcggttggagcgagagtgtcggttgcaactttgtgctcatcccggaggatcttgcagtgctcagtctgcagacggcaccaggtttggaaaggcaaggagctatcgctggtttccgtcttctcgggatttaggatgatgtcttccaaatcttccagaataattctccacgagacaatgtcgacaaccaagtggtgagctgtcattgatagaacattaggctggtccttcaccaagaaataatcgaccgcaagcaacggtccagagaagcagttgattgaggattggctgtcagcgacatgagtcttgacctcgtccatgctgccaagattgtgcatccgccatctgtaagatcccttgatatcgcgagtgatgtgttgattcgatgccgttgcgaatcctgtgtcagtaaatcgcgcacgcagcatcgagtggcgagacaccagagtttcgatagcctttcggagggttgtttcatcgacgggcttgttcaaacgagtgaggattccttggttgaagtgcccttgaccctccttgcgtacaccaaagtgaaggatctggataggcgacaggctgaatggttcatcgacagcttcctcgtaagtcgtcaggtgatcgattgtcttcgcgcgagttgcgaggtcccggattgatttgctccgaagaagctcttgtacggagagagaaaatcctcgcttcttgcagagaccgatacatgtcatagctgcgatcgaatcaccgccgagggcgaggaaactctgattcaagtcaagctggttctggggaatgttgaggacacggctatatacagcagctaaagcatcctctatgtcgttggcgggctgtgaagcctctgtgccgacgattgcaacagaggtattgttctgaagatcggggtcattctccatacctgcgacccaagtggaaatgcccttgcggtcgagtttccctgatggcagaagtgggagagcttcaacacacaaccaaaccgcagggaccatataagtggggaggcgacccgataggcgctctcgaattcctgggacaagctcagcctttttcgaggcggagacaagttgtagaggctccaaatccgaatcagactgttccgcaagcaatccggtggaagagacaactgcggccaaccgtcccttggagaaaccagtcttggggaaaaagacagagcaatgagtgacgttcaaatctttgctgagctgattctcaatttcgccgagctcgatgcgttgtccgtgaaccttgacctgcgtatctttgcgaccgatgtaattcagggcaccagattcggagttgtacctgacaagatcgcctgtcttgtagaatctacggttagagccactttcagggtccaatgtagtccaagcagggtcgtagatgaacgattcgttcgtcttttgtggattattcacgtagcaccgggccaggggtgggccctccagaagtagttctccggggcagcccacgggaaccagttcatcgtggttatcagggttcacaagccaagtccgcacaccaattggcaggccgatatctttacaatcggtgtcaggtgtaacattggaattgagcacggatgccacactggcctcggtaggtccataaccattgaccagtttgattttggaccaagtagccagctgggactgcgacattgcctctccggccaggaccaaactctccagtcctggaacattctcgatttcaataaagccgatgaatgacggggtgaagcaagcttgggtgactcgcatctcgttgatggtagtcacaatatcgttgaggcgagcttcctcgctcggaatgcacacacatgcgccatgaatgagcggcgtcaacgcttcggccaaactggcatcgaatgtgtgagcggcgaattggaggcatcgcgactcgcgataaatgagcaaaccgggtccatgcaccattgcgccggacaaaaacgcgcggtgctccaacagggttccctgcgagacataagtcagctactcctgcaggcaactatatttaaatattcacaaagggctaaccttgggttctcctgttgatccagaggtaaacagaacataagccgcattttgacccgtgacaccggatgccagattgacattctcggcggggtcagacaggggatctagagtatcagcagaaaggggtattaaagtcttcgcaataggacgaagtttttcggcaagatgctgagagcacagcacaaccggcgcctgaaccgattggatgagagcttgtagtcgggaagttgggtgagtcgggtccaatggcacgaacgcgccgccggctttcatcacgccaagcattgccacgatgttccatttctgccatgtcccgtcagtatgcctgcaacgaaataaattctggaacattgatccatccatgaaacattccactcaccgatttatcgaaacacaaagccacgcggatttccggcccgactccctgcatgcgaagatggcatgcaagcttcgatgcttggtggtccaactcggcgaacgtcaaactgccatcccacgcacacacagcctcacgatcagggccgctcaacatttgatcgtggatagcctcatgaatgcagcgatcgtgaagctgcggcatggtggagttccaattgcgaatgcgttgccagtcgttttccgagaacaaattaagctggctaatagcggtgttctcggaggaaaggactttggcaagcaattgctcaaaaatgtttccaatactcttcatctgctccccggacatgtcacctttgtgccattcaaggaagatgctgatgtctccacgcagcaccttaacatgaagacggacttgacactgcgcattgttagagaattgcgtttctgtctgaacaaaatcaggttactggattaactaacctcgtccggaagagctgttgccaaaataggttttgaagaagaagcagtgtggtcatatgtgcgcagcatcaagatggtgttgaaagggagatatccctcggaagtgacgtccgagctgccatcgagctggcgattcgcactgtctgcgcgcaccttatctacaattgccgtaagagagtcgttgtcgttgatggatatgcgaattgtcgaaatattgacaccggtagaacgccgtacagatgatttgagagagcgcgagtcgccctcgagatgttggtaaccaaagcatatatcctcggaacggatatagtaatgcaacaagagagcccaggtggctcgtagcattgggtccagacggccttcgttcgatgcggttaataactgcgcatgctgagcagccgttggtctcgtcttcatcgagactgggcgtttaggcccgtcaatcgtcgacgcgaaccgcggaagataacacttggtggattgagccatgctgtctaatgactaggtattaccaggctgccttctatttcgttttgtgttttccggtcgataaagagagtgtgggcctaaggtacgaagaacgaatgacactattagttcgacagtggttaaagagcgccgcgaattcggacggtctcgccttattttaaagaaccaacaagttttttttttttctaaaaaaaagtattattttcctaccccatcgaaaatagctacgttcaccggccggagactgcatgggccacactctcaagaatccagtaataggcgctatattccttgcatggggtcgagatgaaagggagaaggatggagagagacaatacgtggagcaggcgtactttggcccccctgtggaaccgattcagactcttttctgctatgtattcttttttcttgttttcttttatttccaagcgaattgccatgtcgaatttcttatcttattttctattttgaactgccaatgtaacccttagaaaaggactagctcactcgacctaacaccaaaaggtcatcatgcaggggaaaggtccctacactatctgtctgtgtactctgtactccacagcaactgctctttcagagcccgcagtttccccgatctagagcccttgcggtctggaacgtgggaatatcgattcagagcaagccgtcaggggcgtaaggcttttcaactccgaatcatgctgaaattggatggcgttatcgtccacggggtgctctttattttttgcccttatccttacaaggttgcaatgctgacgttgctggcgttactggctacctgggcatatcaaaccgcttatagtaagctggtggtcatatacatgtgcccagctaggatgtagccgttaccttcacttcacaccgcggatgaaggctcttgcttctctgctgcattggcatcgccacagttacacgggcctcgtgaggcgtttataggtcacgatgtacaccgactggtgtgcacatggcactgaccccggactacttacttcaatctcacctctactttgtactttagaagctctggtgatgggtgcatggcatggaagtccgaaaactggggactgtatgtatcagcaaggtgtggcgagctaggacgggtcgaactagggatcaccgcgcagttcaggcacgaccgcatcgagtagcggaggtggcgactgggtccggtgatcgggcaaagttaatttcccggcacctgacatgatgtcttgatcttggaagccttggagaagctcaggggatgttcaggagtcaagaaaaacccaaggaaaagccggctgtgggtcgcgggtccgatacccgatctgaggtcatcaccctcttcgttgacgggtatccaactctctcagtctataaatcagaatatacgggggtagctatgacttgcatcggagggataccgttgggaacgacacactctaagaccttcttcggcatagccggcgattggatctcagaatgaaactttcaagagttacaatttacggaggaaatccatataactaatctaatgggtatatgggtacatgatgtgtaagacacaacagaccacgaatggtcgttcctgcaagggcctccaagggatacgggcgtatccgaacccggagactcgtcgacttggctgtatttttataacagttacatccacaatacattcaatagctcaatgctagacgagaatatgcgcataaactgaaagtgggacacaatatctcactcggtagctactccgtacggttcctccgatcatacccagttgcgtcaaaaacatgtcctcatggggtgcagtatgtagattgcttttttccttcctcgccttctcttctcttttcttgttgaaaactcttctcggatctgtcgctctcgtatgagcaggatctggaccgtacctttgtatgcccactattctcactagtcaagatatcagtcaagatttgaagaagctaagtggatatgagtggatgtacatcccacctatagggatatggcatttttccctcggagatccgcacgggaaagggccgatattggcaatacacaaatctgcactagttgacacttatgacaggctagcctagcgcccgcagttcggcgtcgattgtggactaagaacaatggaaccacctaacaggttgatctcattgttgatctttattgatcgtcagatagatcactttatcgggttctgcacgctttgagccccaacgtaagagggaaaaataaacgaaaattttccaagtgtccatggacatatgggagtacgaaatataccaaatgcattacagaaatgtctctccgtcagacagtctggaatcaactgcagacgtgagcacaattggcacaggtgtactccgtaaatcagtggggtccattatgcagagtatttgccacgcatcaaccacgcctcgaggacaagggggaaatgaaaatgaaaaccggcttaccctggtcaatcggctccatcggggacgattgttcgtcaggcactacagctgtaggtacatatcccgacttatgcacattggctcagtgagcgccacgcgaaccacatcacgtcttggaatatgcagcattcaggttgggcggtcgcaattgaaatccgtaatgccgatgacagcagaaaactccgaaggattcaatgtgggccacgccaaatggttgagtgaaaaggaacgattggcccggatgaaatgaatatgcgaatcctacggccactacggaggcactaggagcaaaatgtgacgccatggcggttggagttggagattggagattcaattttggagaattatgattgtgacggaacttgcagaaaccaattgtattatgcatcttatttcctatgtttttctccagatgtggaagattcaggcgatttacttcattcgccgtgtctaacttcaacttctgcggtgaagcagagttcgagaaatatatatctacgcactgagactgtaagcttggagagtgagaataagaataagaatagaaatagattacattaactagttatattaaattcaattaataataaacactgtttcaagccagatccggcagatctcccatcctacagatcttttttcgccctcacatgagcgggaagtgattccattgccctaactcgacacgcgcccagatgcccagacattcgccattgcaactcattggaggtcattgaggtcattggactcattggagtctaattattttctttctgcaaggtagcacgactccctcgtgtcgctcgggatttactcgaggtttccttgactccagggacggaaggatagcgatgccgtggatatcccccacatcctcaaggggggcgaacgagcctatccgcaatttgtcttgggaatcaggaccactattgatgacggaggtggggtcatgaaatcacagtccaatctcccaaggtcttatagtaaaacaaaaacaaaaaacaaagaaaaacaaaccaaaccaaaccaaaacagatgcagcaggatggatccatacacaccgaaccgagtctagatgagctcacaagtcattcagtaaaagtattgttgtaagatggttgcatcaagagctgtattcattcccgctttgatgcagccaaccagtagtagggtcaaaagggtagtctcggtgttttagttctcctagatgcaatgagctcctgcccatagggatgcggacctcgtctagccctaggtacctttattatgcagatctagtagtaaagctgactgttcttatgtcactttttgatccatccgatctagcccaaaaagccgcaagttccccgagctcatgcatgttcttttaaccatacactcttttgacttctgattccccgtgtcgctcgttactacgtctttcttttctttaaccatccttccgtcgctaggtggttcaggaacagtcatgacatcttccggcttttcagggccttcgtgccgcgatctagataatactttccgtattgatgctgggtcctgtcgcggaggattcgatttctctcttttatttgaggagactatcctcgagatattacctattctattaatgctaattattattcctggccgtctgtggattctcttgcaaaaacgaaacaaggttgtgggatcatggttggtgttcgtcaagcttgtaagttgactgtgttgatatactctgctttctgcagttcggatgcatcccccccccccggtctttgcaattgacaaactattggattcaggatactcttaactaataaacatatctaaacaggcggcttggttggcactgctgggtcttcaaattgcacaaacagccctatgggcccttccagcagccgacattaccaaagcatcggttgcagccaatgtgctcctcacagtcggcatattcgcgctcgtcctgctttcttatgcagagcacacgcgttctgtgcgaccctccttcattttgaatacctacctgttctgcagtttgcttttcgatatcgctcgttctagaactctgtggcttcgcagtgtggacagcttcaatgacatccttgccattctcgctacagtagcggtcagtgtcaaagcggttctgttcgtgctggaggctgtggagaagaagcacattctcaaatcggaatacgccaattatcctccagaagcgactgcaagtttctataaccgtgctgtgttctggtggctgaacccactgttcaagctcggctacaccggtgtcctgcgtgtggaagatctcttttcattggataaagaactgagctctgagcgcctactgactcgatttgatgagaaatggagcaaaggtaaatagccatccacgccgatatgtgagtttctatgctaatatttctctagtgactactaagtcgccaaacactctccaatgggagtcattgaaggccgtcaaatggcccctgcttgcgggtatccctgccagagcttgcgtcgtcgctttcaacttctgtcagcctttgctcttggagagatcgatctctttcttcaattcacctgtcaaccagggtacccaaaacatcggatacggacttattggcgcctatatcatggtttatggtggactcgcaatttcaatgggccagtatcagcatctcacttatcgcggcattaccatggtccgtggtgttcttgtcacaatgctatacaagaaagccagctgcttgggccttggggagatcgaccccgccaactcgctcactttgatgagcgcagacgtcgagcgcatcacacagggatggcagaccatccacgagatctgggcgaactcggttgagatcgccttggctatctaccttctcaaagttcaacttggagtttcctgtgttgttcctgtttgcgtcgctgtgtttgctttgcttggatcgttggtcgggatgtccttcgtggttgcaggacaagctaagtggctggaagctattgagaagcgtattaatgctacttccgggatgcttggatcaatcaagggagtcaagatgcttggcttgcaagattccttcatgaagtttgttcatggtcttcgcatcagcgagttggatatctccaagaagttccgtacccttctggttataaacatgggttttgcctggttgacccggatttttgcccccgtcttcacctttggtgtttatgtcggtacctcaagccagcccttgagcgtctcccgagctttcacatctctgtctctgttctcgcttctggcagaccctctcttgaccttggtgatggcacttatgtctttcgccggtgccgttggctctttccagcgtattcaacagttcttggacaaagaggaccacgtcgatcgcaggaataactcgcagactttgttcctcgatgatctcactgaaaagcgtgtgctgtcgaaggctaaggaccttgaactttcttccatcaactctgactctctcgagtcgctcaagcgctccagtgccccgccttctggaaacgccgtcgttgtccagagtggaagctttggatgggaagcggataaggatccaattctcaaggacattaccataaccatccctcaagccagcttcacggttctcattggaccatcaggatgcggcaagtctactttgctcaaagctttcctcggagaaatcccctgttccgaagggaaggttgcactcgccttccccagcgttgcttactgtgatcaaacgccgtggcacatgaatggcaccatcaaagaaagcattgttgcgatgtccgactatgatcctcaatggtatgcgtccgtgattcgggcttgcgctctggaagaagacctctcacagttccctcgtggggactctgctgttatcggaagcaaaggtattgccctcagtggaggtcaaagccaacgtattgcacttgcacgagcagtctacgcccggagaaagattatgatcctcgacgatgccctcagtggtctggacgctaccacggaaaatcacatattccacaaccttttcgggtcgggaggacttctgaaagagattggaactacagttatcgttgcctcatcttccgtcaagcgccttccctacgccgatcacatcattgtcttggaggaaggtggtcgggtttctgaacagggaagcttcgctgctctgaacaagactggtggatatgtgtcaagcttcggactcgggctgcctgattgggagtacaaggctaagcgattttccgacactcccagttacgacagcatggacagtatccaaaaagaaaaggaggcattgatcgaagagcctgagcaccatgataggggtggcgatctcggaatctacacatactacatcgacgccatcggatggctccctgcgactgtcttcatggtcgcaatggccggttttgtgttctgcatttcattccctagcatctgggtaaaatggtgggctcagtccgacgctgcacaccataagcaagagatcggccattacgtgggtatctatgtaatgcttggctgcatcgccatgatctcactactcgtcggctgctggcaaatgatcatcactatggtcccaaagtctggcgagagcttccaccgcaagctgctgaccactgtcctcgccgccccgatgttgttcttctcgagtaccgacagcgggtcaatccttaacaggttcagtcaagacttacaacttatcgatatggagcttcctgtcgctgcgatcaatactgttgctacgttcttcctttgcctggcacagatggctcttattggagtctcctccaaatacgcagccatctccttcccgatcgtgcttggtatcttgttcttcattcagaaggtgtacctgcgcacctcgcgccagcttcgttacttggatatcgaggccaaggctccgctgtactcgcacttcaccgactgtcttcaaggacttgtgactctacgtgccttcggatgggaacatgacatggagaagaagaatatcgctctcctggatcactcccaaaagcccttttacttcatgttcgctattcagcgctggctcactctgtcgctggacatggttgtggcgggaattgctgttcttctgatcgtgctggtcgtcgctctgcgtggatcaactcttagtgccggctacgttggtgtcgcgctgctgaacgttatccagttcagtcagagcatcaagcttctggttaccttctggaccaacttggagacgcatatcggttccatccagcgtatcaaagactttacgtcaaccgtcgagtcggaagacaggcctggtgaagaccaggatgtgccccctaactggccctcgaagggtgcagtcgccttccactctgtctctgcggcttacagaccctccgaaccagttctcaacgatgtttctcttactatccaggccggcgagaaagtcggcatttgcggacgcactggaaggtaagaaacaatctctaattcaatatcctaattcttgctaacaaaacaacagtggaaaaacctccatgatcatgagcatcttccgcatgatggaattaactagcggcactatcaccatcgatggagttgacatcagtcgactcccccgacgagcgatccggtcactgatcaacggcgtctcacaagattcccttctcttccaaggcagcgtccgattgaacgccgatccgaccggcgaccacaccgaccgagagatcttggcagccctcaagagcgtccagctcctccctgcgatccaagaaaaggggactcttgacacagacattgacgagatccacctgtctcacggccaaaagcagctcttctgccttgcccgcgccctccttcgcccaggcaacatcctcattttggatgaagccactagcaagtaagtcactcccctcacttcaagccacgtctccacttgacaaatatcgtttcaaatcccctgcatgagattccatccgggcgcgattaatttccttcgcgttttgtgatccgtgcgattcagccacacaccgatagaaccaccccttgctgcaagaaccaagactaacccactttctgcaacagcatcgacaccaaaacagatgaaattatgcagcgtgttattagagagaaattctgcaaccacaccatcatcgcggtcgcccacaagcttgacacaatcctcgacttcgatcgcatcgtcgtcttggaggctggtcgcatcattgagaacggggaaccgcatatgctgctggccgacgccaagtcgcacttcagcaacctctatatgagtgtcatggcgaccgaggaatcagattaattcctcttttggtttttggtttttgattttcggtttttaaaaattgggttaggttgtttgattgatttggcacctatacaggttgacgcgtcttctttcttctggcgtgacaatcttccacattccctttttcgaggtacatatcgacgacaacatattgatcttttggacattttcggagttatatattggttttcttgctggaccatgttcttgttacttttttgttctgctatgattattatttactctctttcattaccttataaccatggagtgatacttacacataactcccttattggacacttgattcttgatcttaataatctctaatattaattcaataccaattatggctttggctccttatcatatttcttatccagtaaatcaaaagcattattgcattagttttcttcatctgtgatattctatgtctatggtcgacgagcgggactttacagctcgacatacttcttcagtatgatccaagaagaatagacatacatatagtaaaactgggtatactgtcgtttatttcctttcccttcctatctgtagaaatattggacttgaccattttaaagttgcttgatatatatatcgcaggacttccatccatttccaaggggtacccaattgcgccaggaaacattgcactgaatcacatttgctaatgcagtcatgtatatctgcttttcaggttatgagcgcattgctcatttaactgtatttcatcaacgcctcgagtcctccactggatctccccggacttccattgctgtcacattcgcgccccaccaagatctaccaatcgcagagctttacctgccctctgcgaagtccaagtccatctacatccatactccgtactctcaccatccatcgctttatcaaatggagccccctataaatcttgaagaggtgcttgttgtgaccctccacacaccatttgggtgattcaccctgtttgcatcatcgaagcacattttcccgttaaatgaagctactatcagtatgtttgaaaacccaccaagtctactctttgcatataccgattaattcatgttagacaagagatttcaactcaaggcaccgcatgcccggagtcatcggagtcgctaataatccaaatgctaccctctaacctccgcccaactgtttttatatgttcgagaacgaggtcgaacgcccacaactggaggatttccgactcgccggatcacggaaccgactcccgacaccatcgataatagcaagtacgatcttttacgccccggagttatgtatgtcaagctctggaacacgttctaccaccgactatcaatatctcactactacacctctggagtacttgttggagactctaactccggcgagcgatatcgcgatcgtgagatcgcataacaatgtagccttggaaaaagatctaccttactccgtacaagatttcgtctccatcgataaacttacagattgccccttttccggctactgtggtacatatgtacatgtgggcctcgtggccggatgcgcgttcctagcgatgatcctggtcaccgtgaatgggtcaaaacttgctggtgctaaatgggtcagaggagatccactgataatccccgagatggtatttgcggatccgcgatctgcaatgaggatggaaatgtcttccgatatgcaccgacatcagatcaattcctaaattggcgtctcttcgctagacctgagtgtctcattgggcgcggttttaacgttgcagaatagtttaactttcgctttgctgtcatttggctaaatgcacttacctgcatatatgtactcgtagacctacggagtaattacattctatctatgaagagttgtataaatatgctcattatgtctcagtcagtatatccgtactccgtactccgtaccttggtcagattcggaatccacctgcccaagaaggcgatgattggcctatcctaattaggtatcctcatccctggtggatacaaggacaccccttctattgtcggtgcaccagccgtggctgttgatgggacctgttttcttcctgcccaggtgtgcgccttctccacctttcgttacccaagaatcctggaatattccattcatgggaactgtcgatcaccatttcttccctcgtgggacttctaatgcccatcaaaactactccgtacggaggaatataatacagtgacgcagcaaaagttttaagcacccattctactactacgtaccgccttcctaataaaacataccgccttctgaatttgtaataccgctcgttcccctcattatttgaccggcagaattgggtgctgagaattttgctttgacactgtacagagtagccttggtagccattatggtggagccaaacatgtcctcttatagtggtatttgaaagaaaagcaaatcctattttgcaccccatccgattatggactaccctaatagcaaagaaataaaaacacccatgtaccatacattgaaacaaaagaagaatcaaattcgacggccatggcaatccccaaggccaaaatgcaaagggtcatagataagtgccctgcgaaggtaccaattatagaaccatcgtttcatcattatccacatctttctcttcatcaagaccaaattcccagtctccacgctcaattcggctgacacggtcgagctcagactggaattcgcgacgcaggtgctcaagtgtcacgattatacgacgtttaagcaagtggttggttgcagggacttcgaaggacccaatgctgttacgccgttcgatggtggaagttttgctgcttcctgtgcggtggtcgggtgcaaaagcgacggctgtggatgttaggcgattgcgtccgagtggtgtaggggaggcggggtctacgtcctccatggagacgttcccttcttcatcgacttgtgttcctaagtgtctttcgtgaggaggaatcggggccgcgctgattggaggtccgttctcgacgaggatataagcttcgcttttgtcgacacaagcgaggaggttgattagagacaacagctcatggcggatttccttgctttcagcatcgtcttcctcaactggcgaccgggctgcatcctccgcttccctgcttttaagaatgagggctgatgacggagcatctcgtgctttgcggaggcgctggacgttgcggtaggcgatttcagcggctccgcggtagtcactgcgggcaatgcgataggcctggagaattcgggtgtagtcgggggtagctgggaaatttttgctgtccgcatccagccaggatacattggtggtttgtttgcgggtcaggtgaacgaggatctcgtcaatgaaagatgcgatgttgggcacgagcgaggtggggaaacggagaatctgcttaagaccagcagtgccaggtccagagactgccaggatggtggagatgagttcggtaagttcggttctttgtaatttgagatcctgcaacctagccagagcggaatatgcctggtcaaactggcaagtcttaagggctccagtaaacagacgagacagcagatcgtcgcgtacggtcgggtattcagagtcttgctcggcccagatttcagagtcgagggcctgcagcgccaggctggcaaagtccgcgacatgagagtaggagcgcactttttcataaatggagaggatgtgctggtaatatttcgcaagaccgttgtggaagcagtcaacatcgaggaggtctaaaagctctgctgacatgtcggaaagattgcccatcggcttgccgcaagctgcatttaggttagctgagttatatcaacatgagaaatcaccaggagatacgtacagagtagataggctgccttccggaaatatattgctgccgtatcgaattccgacatggccacatgcaatcgacccttgacatacgttgaccaggcagtacttccctggaaacgaaggaagtcccatgcaagatcgatgttgttcttggcgatcaggtcacactggatgtgagcgactgcgcttggatagttcacttcgccttcgcgggtaatccaggccacgacatctctgattcccaaagtcaatgtatagctttgtggagagtcaatcgcttgctggggcttgatatcggtaacaaacagatcctccaggatgctcgtagttcgttcactgttagtcttcgagctgtctttcagtgaaaatctctgtgttgaatcgacgtggggcttgcttgccctgtcgggacattggcggacattagagctgagccaggacatcatctcatattcacgtaggagatcaacaagcattgagaaaaggtcggacgcatcgaagttggacttgcttgtttgctcccattcgccatccacgaacgtgacgaggattagtagatcaaaaaagatttgacgagatatagagattgtctcctgcgcaccactgacgagaactcgagcgccaaaccatgttgaagagagttccgagtcttctccacagaagtgaagggaggcggtatggataatggcaaggaacgcctccatggacaagcaatcggtcctcatgtattcactaagggctgcatccagagtgtcaaaggctttgttggaaatttgattggcaaagtcacagcgctctcggaagttctccatgcggtccatgatcgacgaagaaggctcagaaaagatctcggcctggagagcggctcggcacgccccgtcaagctctggggagaatcttttgcggaaatcggatgccaccttcaacaatccagaggctgtttcgaaattcgggcccagctctctggaaacattgcgatgcctccagcgatctaccatcttcggcactccatcactgagctcggagctggaattgtgcaagaacaattcagtgatgctgcattcccgcactacagcgcaagagtctgacaggaggagccacggcatatcggtgtatgagtcgtacgcgagagaaattggttcgaaccgccgcttgttaaggtcttccgcaacttgccagaactgacgccactttgaatctgtatctgaaagataccgggggtagtccatctcatcgtccgcaaatttccgaagggagactgccgctgctattgtggagcagagtcgttcctctaaaggcagactctttttcagccctccagatgaagtcgacgagagtggcttgagagcctcctgataaacagccagagcggtctcaaggacttcaggcagatacctattcggttgcaggagatactgtagccacttctccgttggatccaccacatcatccacgaccagaggtggtggcaattcttgtcgatgggtttcgaatgttgtcgaaacccagttagaggcccagtccgcgactagggtttggaggttgaaatggagggtgtagagttggtaaagaccgtggtttctccagagcacccacagctccattcccttgccttcttcccgggatttgacctggaaatcagcgatgctccagaacatgttccctgtggcatccggatccacaggtcggaaaatatcgtctgcgaagagttcctcaatgatcagttcggatgtcagcccacccttgacagcccagaacttgaactttccgtcctcaaatggcgaatatgtgacgacatagaagcgatgtccaccatgcatagctcgctcggcgttgaagacgcgcatgaatgatgtctcggcggggttcagcgtgtacggtgcaagatctggatcatgaagcgagcgtcccaggagatcttttgtggccgccagcttgttcgttgctagattccaaatcttaagagtgtgattcagacagatcgcgaagacgtatgtctcgtcggaggtagtggcaatggcatttgcgacatgcaaatcgaggttgcgtccgtcgtgtttgatcgaggagggtgcattccatttgacgaggcctcgaatcgaagagccccatgttcgttcgtcgaaagtgagaggagaccaataggaacctagtttgagagacagtcaattaaacaggtgttgtaaaggtaacaagaacgagaagaaccactcaccatcgtcgccagctctccgggtcagccgtagaagcgcgccgttatcgagagagatgaacaactctaggggactgctcgcgtgtagtcggtgggggttcgaaaaggccaacggagcggggaggaacgtcttgcaccaatccctcacattttcatcgattgaagaggtccgtcggaaaaattcagggcgtagagacagggtgtgaaggtgcttagaagcggtgatcacaaagacactgatgagttcgtgatcctcggagtcggacatttcaactccgaaggggagaatctcctcctggaaatccagtcgcagggtcacattgtattcgtaaacctccattccacctttagtcaggtccgcgcactgaatctccagcactttgttgtcgttgatgacccgccacaagaatgtcctcggatagaccctgcgcttccgaaagtagacctcaccctgtgtcgcgaggtgacgtctggcaaattcatcttcatctttggcgattgggagttcctggtcggtggatgagatcgaaaagcgtggacgacggatcgcgacctcttgagtcggaatctggatgttggcgaccgtggtcggcgagtagggccgaaggtcgacccttgagtctttgtaaattttcgccatgatcgaattgacgtgtgtcaacttagcactccatggccggggaagtaaaggttggaagatcgaagggcgggaagctggagctctcaaaaaacatgggaagtcttggcgcgataaaaggcctgagattgatggcttccgccctttgaggtttactcagaccacttacactctattttactctatgttatcttctaggtgaattgcctctcttcaaaagttaagaataaacagaaattgtgatttctaattgctatcaaaaaaaaagatcccccaacgctgagatgagatgccacgggtcgctctaaccacataaacagctattgaatataagctcatcaagtcaataatatcgtgtcgcagaacaagacaggcacaaccttgagaaatgtcgactcatttatcttccaagtccttctcactaggatcaccgataccattatcattgatagcgaaaaggcaatcactctctggaagacaaggactatcataaatcttgcaaattcgagtctcgccacggcccttcttcagactgagtcgagtggtactggcgtgggcgatgatattaccaccaataggtttcttgggatccgggttaaacatagcactggggccaccatcgacttgggcaacgacctggtttgtgatcacgactgcaatgccaaattcatctgcaaggcgttgcaaggtacgcatgaacttagccaaatgactctgccgtgaggcgagctcaccacgaccgttaaaatccgttcggtacagagatgtcgcggagtcaaccaccagaagagagaatcgcgtctcgcacatcatctgtgaggcctggttgagcaacgagagctggtggtctgagttgtatgctcgtgcatatgccacattatcaaggacctcgtcaccgacgagaccgtatcgctctgcaaccgcaaggcatcgcactggacggaaagtaccctctgtatcgatataaagacacttgccctcgccgccacccatatcaaatggaagttggcaggtcaccgcgagagtgtgacaaatctgactctttcccgttctgaactccccgaaaatctcagtgatcgaccccgtttcaaacccacctccgagcaatgtgtcgagtctcttggatcctgttgtgatagagatgagctcgctcctccgggcatgcatttcagttgccgtggtgaatcccatagggaccagtttcgaggctaatcagcgcgtttcaattagcgaacccatcttcaatgtagaacttatctgtcgcagaagaggggtttaccttctactaggatcttagtggccttttgttccgagatacccttaatctgttccaacaaccgtttgggcctaaaagtcacagtagtgttaaccaaattgagatgagcagggcaatcggtatagcagagctgccgccggggggaaaaagccgcaagaatgaagatcatggatactcacgtgtaggcgatggactcaacagtgttatatcctgcatccaggaacaacttaatatccctagcggtcaagcccgaaacaccctatcagaaccaatttaatttagtataaaggtccaacattcttcggcgaaagaatatcgccgtgggattcactcacgtcgagcgcggaaagcggagtgggggctccagggccaggaagtccactatcctcgagttgctcttctccctccatagtagcagtagtactcgtttctcggtgttatgaggatcttgatgccttttggcggggtcactcgattcgaaagcacaggtgatgacgcgtttggggtttgggtgagatgagtactcgctcttctcgattttgaatattaaacaaagccacgggttttaaatgatcaattagcaagcagaaaatctctgtaaagtctgaaaggtctaaagcgtctgtttgtggcaaaaaatctccggatgactctgagaaacaaatcggacgcgtcaaatggatcgcgagatcacgtgcagtgctgccttgagcctttccggtttggcataacgaactatatctcttccaatttatgaatacaacatatgtgtgaagcgcatgtattactttgtttctctagtactaccttacgattaaattaccagcaatggttttcattggggcggatcaattactgtattcccagtgggtcggatgctaatggttcaatattcaataacaaaaggtgtaagaatacaaatcctgcaatggcctgcatgctaagacgccgtctgtccattgaatgatattcactcaatgttctttgagtcatggaaacccaagtgctgaaaaactgcccatgaactgccgcaacgccatatcaaaatcaatgctaaatgtccgagcaaaagcaggtgttgaaggtcttcgaggtgtttgttgcattcgttttccttgcgagacaatgattttttcgtgtactgtatctccctactgttgattctcaggagaattgagccacggacggaaaggacgaagcaacgacttccggaaccgtctctgatactgacgcagagccggattaaactccagctgctcggctggcagtccgatttggatattttcgttgaagatctggcttatcctgcgtcggaactcttctgatgatcgccggcgaagacggtctatgaatgaggcgcattagtttctgtgttcaattcctaaatcgtggcaaattaaacttactcatggttcgtgagccccgcttgctctctggtgaaggaccagatggtgactcaccgatggctgggacatatttcatgccgtcatcaacgccgtccaatcctactcgataatccttcgtgtcgggattagaggttgtaccgaatattcgcgtgtgaaagctagcacgcttttccctaactgttgtgtccttcatgccgatcattgactcctctcgcgcaggtgacatgcgcatggaatctaggttgagcagactagatcggccataaagtgcgctgggtctttggttctcgtaggtgaagcctgcggaggctgggttgagctcgggaacgacttcacgtcgggcagccagtggcatgggctttgggttgatcaaggaactgtgagattccaccgaggagctgggggtgtcaatggttctatacagcgaccttggcactggactggccggtcgacttggaactggactttgcgtgggtgtgttgggatctgagacccagatcccttccactcctattcctctttccaaagctctggcaccgaaagggatgtcatccttgtgcagcattgggtacacctcagcttcctcctctcgttcttttgcctctgtcgcagtgtgtttgctcatcgtccagcgattccagccgaggacgcaaaaggcgtaaaggagcactaggatctgcgaagcttgtcagttggcgtctttgtggcattatcatggagtcacgtacgatcagcgtagctagtacctgtcaacgacaatggtcagcaggggacctccgtggtcatgagtgtatacttatacttaccacagtcagcttctcccatagctcccaatctacccagaacgtcatagtggccggttactttgaactgtattcgggctttaccgtgaagaacatccgagtaagaatgtgcagactttcttttggggcacagatgaaagagatttacggataaaaagatactggagagggattccgaggtcttaggttcgagcaaaggtgatctctttccgggaacagggaaagggcagtggtggcaggagcgcctgcttaaagcatgtccgtatagttctgggttttctttcctttttgttttttccttttcatattcatggtctctagtacgtaggccataagcatgcgggcatttatgatttacatacttcattgactgtggatacacagtgtccagttttgaattgcagctatgaacagctactgagacggccattcaagagagggacaaaaaaattagctcctaatgttgattgccatataaaaaaaagaaaatacagaaaaaaaaaaaagaaatctctccctcggggaatcgaaccccggtctcccgcgcttatcggttttaatgacaagcggaaatcatcaccactagaccaaggaagaatgcgatggccgagttactgctcggccacttggctggttgatagggaggttagccatctttgttattataagccagacttttaccgaacatcttcaatccacaacatatgcaaaaggtacacacgtacgacatcttggtcgctaaactctcaaattaactacaaaaaatattgaagagtctgccttcttgatcttataaatgagaaataacaaaaagtcttcattggtcatacgaggacattatgaaagctacttttcgcctttatttcctcattcttttcaaggtttcttggctcttctctacttctagttattataaccttgtgttggcactagatgtgtcaggaagagtgaaattaattgactcagacgcacttgattatatatctctctctcaaaactcagttaaccaccaaaacagaaaaagtcactaaatgctacctgatatgtactcgaaacacttcaacgagccccaggcttggcgtttcctgggagacaagtatccagtcttgtcatcctgacagcccttaaaagccgcataggtctctcctatccagtcctcatccacacatttcgaacccgaatacatataacacttgccacgtgtgagatacaatgacttaggctttgtcactttactggaagcacaggtgccccagttgagaccaccgttagtccaccatcgacaggacgtggttgtattcgatattgtggtgtcggtattgtcagcgagaatgatacaattctcagtatcttgagtttcgtgtccttgaagagagaagtaatcgcctgtacaaccagcaccttcgtatattgtcatttgccaagtcgcagacggagcgacactgctcgtggtttttgttaccacttctatgctagtcatggttaccatgttcaccttctcagtagtagtctttgaagtagtcgatttggaagtagtggtagatttggaagtagtggtagatttggaagtagtggtcgatttggaagtagtggtagatttagaagtagtgggcttggtagtggttttcgtagtagaagtctttaaagtagtcgccttcgaagtagcacttttggttgtgacttccttttgggtactcttcggtccacaattgaacaagcaaccgctgctagcatcgcaataatccgagctagtgccacactgaccaaacttagaacactggagatataattagtagagtcagcaagatgggcaattccgacaataaacccacacattgattcgaagagcactggtttagagaggcgagatcggcatagttggcagggcgtcttgtcccgggaacctgaggaccgcagacagcatgcgggagagcaaccggcataggaagggcaccggagctgagacaaacaaaactgccttgcttcacattgccacaacctgtccagtcccaggctccgacattccaagtttcgatattgctggtagtgagctggtagcgcttagcaagagctgcgcaggtatcaccctgctgaatggtataggtatagcagataccatcgctgccaggcgcaaatgaactgcgtttattgagtgaatggccatgagagtcgccagagccatgcccggattgggcagttgctatgtggacagacacaagagagaggaggatatgaatgaaatacatcactttgaagatacccttgaacgtatttctggaaggatcaatcagtcctttataaacagttgaatatgagaaaaataattcttcgagattagctagtctgatcaaggtgaccatcggatatcgaggtcagttcattgttcaactgcagaccccaggaaccatacaaggttctgcctatcgcatcgagtgatgggtgagtttaaacaattaattaacaaagaagttgccacaacccacgtattaacctcttcggcttaccctttctttccctacacacgatatccgagggctaggatcaatacatgatttccaagcaaacacaatacggggaagcttacacatacaaggccaaatgcatcagaatacaggcatagcaagagcggataacaggaaaaaaacaacgtaagacttggccaaaaaagaaaaaggaaattagaaaaccctagatcctggagagatctgaaagaaaaccgagaggaaacggagggaaagttggcaacaaagaggctatttagcaataaatagcattggtggtgcccatgtatctggcagactattgagacttcatcccaaaacagtgctcaatagtgctaatggagtcacatcctgacaccagaggcaaaaaacctctttcaagttccgagtcatgcgagagtccacggggagacttccttttgtgtcatatttatccaggtagagttgaataacagtttccttggaccgacaaccttctcaatagctacttcgcatgcttgatggttattggggtgagccaagagaagttgaaaggaaagcagccagagagagataaaagagaatactgatgacagttgccagtaggtaccggggacaagctggccataggacaaatgtgacatctatgctagcaagggtccaaagtggacgcatgaccttcattcggcaagtcgcggcaagtctatgcatttgataagacttaaaaatccaggctattaactcctcgggattggtgagaattatacttcaaagttcaagtactgtggcttgaagacccgggatttgagtcaattgtgccgcactcttctgatttattactaggaagaaggaattgcggcatcacggtccaatgacccgacgcttagatccggacattatcatcgaatgaggttagcgccgactagctcttctgcacgcagtccgaaatctgcacgcggggactccgatgcaggggtattgtctcttctcatccggcggggaattcactcggagaattatggctacgaggtcttctttctggtgtcttctttcaatatgccaccacacaaccaggcacacattatgactttacactgctagtatacataccatctaggtatggggatagtatccacattattcacaattcccgtttacccacccctcccgcatcctctcctgggcatcattgcttgttgaaagcttggcactcttatcactcacaggctaatggctagaaaacaagcctatatattagctttcaagccacagtcacattaagtggctgttacttactgacaattcctgccggtgcgctctgaagagagcgatcacttccatattagttcggctttctcattctacgatacttgttaatctttatcaacatctccagccgtcggacatccggagacccggagcgctggagattgtatccttttagcacactcgagaaatagacaatgccattggactcagaccctagtctttgctgagtatgtgtgtggatgcaatgcatgaaataggtccgagcaatcgaggcatctgggtacttgtgacccgagcttgcgagcagttgcgccgataaagtgatatcttcagaaaacggtccttcctgggtttatgcatcggtctccgacggcatcagaagagatgagggggtgttacattcagagagaagtgttcaatgtgcattagctcgagtacttcggcattattatcttctattcttccgtgaagctatctgtggacaactagccacgatggctatataaacgcgcatttcccatgggagttatctcgttattcacacagtcaagctacctccagttctttcaatcaaacagttcaatcatccaatctgcactatgaagttctcggctaccatcctcagcgcagcgttgctcacagcctcagctattgctgctcctctcaccgaacgccgcgcagctcgcaatgtcgccagagctgagggccgcgctaaccgaatcacccgtccgccttacaagcctgacaccagggagcttcttagtctgaacaagacaagccacgaggagtacagctccaactgggccggtgccgtgctcattggcaccggatatacctctgtcaccggacaattcaccgtccccacgcccaaactaccctcaggtgcttcctctaccacccagtactgtgcctctgcttgggtcggtattgacggtgatacttgcagcaccgccatcctccagaccggagttgatttctgcatccaaggaagcaaggttacctacgatgcctggtacgagtggtacccggattacgcctacgacttctccggcatcccgatctccgcgggagatgtgattaaggtcactgtgaccgctacctccaagacggccggttctgccgtgatcaacaacctgactactggcaaatctgttacccacactttcaccggtggtgttgatggaagcctgtgcgagtacaatgctgaatggatcgtcgaggactttgaaagcggcggctcgctggttcccttcagcaactttggaactgtgactttctcaaacgcccaggccaagtctggtagcacgactgtcggcccgtctggctctactctcattgatatcaagcaaagctcgcaagtcttgacctcctcttccgttactagcaacagtgttactgtgagctatgtttaaggtgaaggtcacgaatattggaaacgtaatagtgcactagtaggcgaaggagagtcgggaggttggggggccgcaaagaaaacagggtttggcaagcaatgggagatactgtgttatcatttgtggtaaatacattagaagccaatcgaaactcattttgccttgattgatacatagagtggggagttatttggcataatctagtggccattgtgtgcactcctcgaaaatcaatattgtagatacagtttagctataccgatgtcctccgaaatattataaaccaaatgaaggtggtgatcatctagatctcgtgtaaatatcgcaatcataccacgtctacatatttgacaatttcagcttaagcattcaggttgagcggcgagacacaagagaacgagttaagctgcgggagctggaaggcatcaaccattcctaggagagaaattagtatggagtaaataacaagaaagcataataactcaccaacaatagccgcccacatgcccagtccacacatcgagagtgatgctaagcagaacacaatatgccaaacgttggtggcgacttggaaggtgccgccagaaaagaaaccgcggacccatcttgccgttgttgattcggtccggatcacctctccggttgtcgggttgaatccttcaccaatctccggtcgaatagcattcttctggatgtcaaatgcaagggcaaacaagggaggtatggtaaatgtcaagttcaaaagcatggaagcggaaatgatgctgacgaagccaaagtaatctggaacggctgcggcaatgataaaggcgatcgtccaccaaattgggacgagagaagcatagacaattttgccaacccgggtattcagaggaggcataccgaaaatatccatcaagacgttattgtagacgatcttgactccaatatttccgtagaggcctgcgcagatcagagcagagagcaaagaaaccatgttgccgacggtttgccacgagtagacgctgataccctggtaactcggactgaagctgtactgtccttggagatgatagacgacgcatccgtgagtgagatagacgctgtagatgaaaaactgggctccccacatagctttgaggaagtctcgaggccgccgcatttcggccatgaattcgacaaacagctgtgcacctgcatatgccagcacaccggaaagcatgccattcaccgacccaatgagtccatccgtggggatattgttgtaatgcatgatcggcgggtagttaccctcactatccggtgtgatcgttgctctgtcaaccgcactgccagctgacccgagcgtggaaattttgtagttcggtggagacatcgacatcacacccatagtcatgaagatgacaaacaaattcatccacactgcgagatttgcaatccagccatacgctttgagagtcctgatctgagaaacaaagaagccgacacaagcaaagatgacgggacagacaacatagcagagtcggaactgtgatacttgagagatgttttcgccaaatccgatcgtgacttggcccacaagcaagagtagcgagatcgcctgagagacatttgtaagatggcgaccgtaccgaccaagcgtccggaatccgagatcaccatagttcttggccgggaactcgtagctgtccacgccgaggaagacacgccaaaggagatatccagagtatccggccatgaatccgaaaacggtgtagaaggcaatgcctatatcccaatcagtcaactcagtgttccagatgtgtacaggaataaatactaacctggtccccaacccaacgtgcccattgcaaagcccgcgccatacgggccgagaatatccgttgtgatcaaatagaaacctagcagtcttgtaagtatggagttcaaaagatacaattgccgacttacaggcaccccatgaggcagacctaagcgaacggcttgcatttgtccattcctcgtctgtgattgcaagtctccgctcgcgagttgaaaagtctttctctgtcagtgttgtaattggcccttcttcggtctttttgcctgagagaagctgtcggatattgagcaccggaggctccaaaagctcttcctcttctcttgtcttcttcgaatagtaatggtactcctcgaatgtgatatttggatcgtaagcgtcgcgagcctgtggtttgatgagggttgttgaagtcaactctccaggcgaagtcaactcccgaggcgattctggcatgaaaccgccctctttctcgtccaaagagagttccatattcatcgacagtgagtgtagaataggcttcaaatgagaatgtatagtgtgagacagatgcgaacattcattgtccaagtgggtaaagttgatcccttttaatgtcatataaaccaagcgcgggggataagcagataagcatctgtccaaagttaattaattaattccgaggtatacaagcattaattcggagtgttgtcggagagagagcccaagtctcctatcgcgggactgcgactaccagttggacgcattaatctaccgataaatccaaatgaatgcaacgataaaccagccattgataacggtctttgataatccttgcctgattgagggtcactctggagaaagggccattgagcgagagctaacggggaggaaagataagtttcgatggaacctcaggcccacaggtgagtgcttgattggtgtctggggtatccggagtgcagccctaattcctcagatctcatgatgggcactgctgtacggagtgcaggagggctagttacattcatagatgctaacctctccccttccccctcacattgagcgaatactcggttctccttgatagatgcttattgctggaatggtcaaacatgtaatgactaatacaaaatagtcacgggacagcgtagcacgggacgcacagtcacgtggatatcgggggaaaatacttccgtcccggtattaacaatgccaatcttatccaccaatacgcagtaaccggccagtatatttttacgggctatttttcacaccctatggtcgtatatatcagataatttgtgggatagaaacatctcgtagaaatacagattcaaatgatggcaagaagggtatgcgcaatgttataggcgacaaaatcaagatgtcctgatgcaatcagacacagaagagcccaaaaagaaaaaaagaaaaaaaaagcaagaaaaaaaatcaccagcatctggctaaagagactttccgtacttctcatacttctcatacaagtgcagtatcgctattctcctctgtatagaggcaatcggggaaattcgccctgtagcaattttagcgcgtgaatcactaattggtgaagtgttgacataccagaaatcaccatcgaatgcacaatagtcaggcaccatccagtcagcggtgggcatctcggcattgagctgtgtaggtgatgtttccattccaagtggatttagcggttgtaatagcatatccacaacagactggagagagcgcttggcctgggaaaacaatttgaaattaccgtcactggggctatgcaaaatatccatgtgtacaatcagaacagacagattctcgattacccgtcgtcgagacggcgggtctaattccttgaaccgacatcgagatgatggctgtagaagatatagtgcaagggccccggcggcagggagagcgcaggatgccacctatatataaagtcagcccaacataatttaacaagtttctcagggtacgtactctccaggctagagatataaagccaaggttcggtagctgttcccgtcggaccaaggcatcattaaccgaggaaattagttccattgcggagcgaaataaacttgagtgttcgagtccatgccgccatgctgcccattcgatcaaaaatgaagactgtagatataaaatccgagtcatatgtaagcactccatttccatgcgcggtctttggatatcccagagttcgtgagatggcaccctcagaaaggacggtaggttctcccatgccttgttgagttcatggtgcaagtcactgtgaacgatcagctaatgtgttgcacgaactgagacgagtcacgtacattattcgccgttgcatatcatatatattcctgcccagaagcaattccaacgtctcttctcgaatcattgctgtaatcgttgaccatcgcataacagcactcggtcggatgtgaccctgcgaattccagccggcgtgatcaatatcttccagctctctactgagagcagtctccgacagggaataacacttctcgtcaatatcaaggggcaagttgatacagcaaaatttcttgctcatgcgcggtggtcgcccgagaaatgttgctaggctgatatcgatactgtataagcgggaaaaaatacgttttcttagttcaaccagaaagaagggaacatcgcgcgcttcttggatgctctcgtggagtccagcggcaagtagagcacaggctgcgtcgttgagccggcgccacgttttaagacctgcccatctgtcactttgagtcacacgcgaaaggagattaagagtttgtagcgtactttgatcaccataaaaaacagactgcacctggaacgtctgatacagaaagagaatatgaacgtcattgagaacctccaatgcctcgcaaaagattgcgcatttatttccaaattgaatgaggttcattcttaaggtctgccgttctggttctgtccggtacagagcatatggtgcacgaaactcagttgcggcaatactatgtcccttgttagtccccttatctctagaacagtagtttccgggattttcccctacccaacaagtgtaaggattgctcccattgtctcccagcggagattcggacccgtatactggtcgatgaggccttgcagcgtcatcaaacgatgtatttccacagggcggctgctattttcaaacaaacgctgtgacaaagctaataaatcggatcggaaatttttagaatgctgtagggtgacaatttcctcaatgactgcatcggcgaatggctgaatgaggatcgcgccgacatgcgactcgagcccgttccccttccagtccgagaaaaagtgcataacggtgttatttatcttggagctggtcagtgtttctagcagctgtgcgccctcgacggtcgaagcgttgttcatgaaacgagtagagtaagctggcccctcatcatcccgcccgaccggaagcaaggtcgaggcagcttccagatccccaaacaacatggtttgctcgcgtacattgcctaacagtgagtctagagaagaagagccttgataccccgtattagggtgtgtatttggtggcagagttggctggatggcttctaggatggatgtagaattaaaagccagctgatgtctggaatgatcgtcaggacgcaatttataacatagaggccgattaaatgaatcacgcactgcattcccggagattggggtgtaaaggagggtcgactccgcttgaacgcattcttcctgtagacgcactcatgggggatatctcgcccgacacaccgagcgcaaggttggcgatgatcgcaggctagtttagagagtcgacagggttcacaggatgcgactctcggtggccgctgtgcccgcgtactctttgaacgaccagacatattcaccacacgcacacgtggaagactggaagatgggggcggcggacgagaagcgggggcgttccccttatcagctgagtcgatgtttttgttttctaagagtgaaaggagacaagatattcatttgttcaggattcgataatttcaagctatgatattttcttcaatgcaggcaatgggccatcccaagttggttgtgtcctcccctcccaataactctccaccggtcgtgagcctatctcactctgtatttgagccgacacaatctcattttgcccccaaacgcgcagaatatttaatcccactagttttcgcacctgctcgtcggttgcaccgcgtcgcatgacagcttcaatgagtctcgggtatgccgagacatcctcgatcccactggcaacagcaggtgtcccatcaaaatcgctgcctgggtcaatttagtatgtgttattccgacactcacagcgaaccactcaccaattccaacatggtcccagccggcgatggaggcagcatggaatatgtgatcgaccacgtcttccaaactggccttgtccgggttgtcaggtcgaatgaacttgttcgcaaaaaagatcatgattaggccaccattttggcggagcatccgaaggacgtcatcgggggtatttctcagacgctttgcgagcgcataacacgccgaatgggaaaatatcactggtgcccgagtcgcagctatagcatctcgcattgttcggtgagacgtgtgggagaggtctatcatcatccctaggcgattcatttcgcgtatcgcggcacgtccaaagtcactcagtccattatccttgcctgtttccgttactgtgctggccgcagtagcgaatgcattgtcacagttgtgggttagagtgatatagcgcaccccgagctcgtacatttgccggatcacggcaagggatgaaccgatctgatggagtccttcagcaccgagcatggaagatattctctttgatttgaaggcttgtcgagcacatgctgctgtgtcgcaatactgcagctcgctatattccgctatcaagcgctttgccacatcaatctgctcaagggtatcacgaacactatgctataaattggagttgtcaacatcgctcttgagcgggaaagggccagatttgcaattacatttggatcgtcaagatgaagtattcggggacactgggttcgatgtcagtcacatgtaatgctgcatgctcaatagtcagggacctcacctctacaaagaccgaccaaaactgcccacccactttgccctgcttcatccgcttaagatctgtatgagatgcaagtccttcatacagccaatattaattagtccttgatcaaacgattggcaaacgaatagaaactataccctgatcaaatggaaggttgtctccataaatctgattgttgagctgcagtcggacaaggaatggaagatcgttatgtccatctatgagaggtatttccgataataccctggtcgttcgagccgcaaagttcaatggatcgatatcttgaggctgcactaggtctcttgctcttatcgcaacccagagcgctatagagatggaaccaatcgcaacaagcttgagaggattccatgatttccctctttgtgcgttgaacacaattacccgactatgattctcattatcactcgtggtaccctcgcacaatgatgaccccgttggccattgtggctcaattgcatccaagcgattcatagaggcggaaaagggaaagagatggccgcgccaagggagattcaggtatcatccgtattgtttgataagagagaaagactaaatcattaatctgtcgaagcgatacatttgtcaaatgtccgagaggttccatgctgtcggacagagtcaggagcgttacaccggtgacacatatcttgctatcataaagattcgcacgattaccacgaggcaaatgcggatgcaacgcagacagataatccaatggacattctttgacttatttgaccaattggcttgctttctcgttattgctgagggaaatcccgcgtgaggggcattcggagagagcacggagagagcaacaacattctccgagcggggccgccagagacgtttggcgttgcgacgttcactatcaagcaaaccccatatttaccgattaaagttcagggccatgcataaaactgacgatgtagcgcgctcgagatcgaatcatgcacacggtcagacctcaaaaacatcatgatttcacttcttgcaaaacaagtcaccctggcactggtctggggtgctgccaacgcccttccaagctccaatgcaagccctattctcgacacccgctccgtgcagcctgcctacgtaagtgtggcagtgacaacattgtggaccgaccccagcaagccgcgcgcaatcgatgagccggcactgacaaacccggtgcaaatggacaaatggctttctatgaacgtgtccgactacagcgacctcaccactaatagccggactcagacgcaagcgctttttggtgcacgagtggacatcatcggccatgagaatggttggtacgaggtggccctccccggacaggcgaccccaaagaacgccctgggatatcccggctgggtccctgctgcgcaggtatcgtttgaccaggaatacggacgactgctctcagaaaagcccttcgcgaaagtcgaaaaggctgccacggttccgctctaccgcgatcatagcctgaagtcgaagctaatggaagtcacctacgacacaagactccccgtcctgcgggagacaaaatcagccattgaagtcgcaactcccggtggtggctcggcttacttgtccacccatgatgcttccgtctacaagtctgcctcggatattccttatccgacgagccttgacctgatcaacacagcgaaactgttccttggccttccttatctctggggcggtatgtcaggatacgccgtcgactgctcgggattcacgcacaccctctaccattcgcatggcattgatattgctcgtgacgctgacgctcaagccgacttcactggtcatggcacccctgtcgcgcaggcggatttgcaacccgcggatctcatgttctacgcgagcaacctcagtgatgcaagcacgatttatcacgttgcgatgtatatcggaaatggagaaatggtcgaggcatatgattctggcactccagtgagaatcacgcctgctcgcttcaccgacgagtactggggagcagagcggttcttgaagcaccgaaagatctgaaaagtttttacagattttgcaaatgcttgcagagtgtttattttatgcatcagatgtaattggttaccaagcattcattgttatagatatgttatgtactttttgatatcgagtgtttcaataagaattcgaatttgtatatattgaacttggatagttgcgagaaagtgtatgaatgtagccagccatgaaaaattcgagactaaagggatgtcagaaaagcttccttatatgaatattctaaagtagcgcaatccccggagccatcaacgggtgaaagatgagattatgtaattgagatgagtcacgccaaatatgatacaagaatggtgatacaagaatgtctaatgatgttcccccaagaaagaaaagatctatcgatggtgtacatatgcaaagtcgtgccgtaacctaagcgccagtgacccggagcacaaattcatatacgccaagcgtaatgatagctgagggtaaagaacggagcatgtgaggggccagacctccgtacaagcccgccataccttcttctttagcgatggtactgaagcattgtaccagccctgtgtatttggcctggccatgctccacaggtgcctggcgcaatcgtgttcggataacctaagaattgagttagtgtgaaactaggataattgccgcagaggggaatacgtacctcatgaggatatgtgatgagacctgccacgagcttagcggaagacgcggcaccactagtactaacccaatggaacacttcgttccagaagggagtccttggcccctcggtagcttctaatgaccgattgagcctagttttcaactgttcatagagcaccagatgtagagccgtttcaatcgagccgaggtagcttgcgctcaatcctctataaaagccacccagtccctcatttcgcatgacttgcctgatgcaatcaacgctattgcgatatcgacgagtcgaaggaccaccggtgtgtgtttgtgttttgtcaagttgtagccgtgttttgacaagccatattggattcgttgctgttgaggttgcgagtccggcgcagattgcagcttgggcatggacgatagcagagtcttccgtgtgtcccatgagttgagctccaacacgcttgcaattgccgtatacgtaaaatttgatggcggtcgccggtactacaccggccatgcttggcccgaggcctcgaaagaaggctcgccagccttcagcacgataaatggaattgataatccgtagcgttttatgacttgatcgttgtgaggtttgaggaagggaggcgtcggagcctttttgtggttgataaaagtcggactgaagacgagttcgtaagacatcaagaggcgaagtcactatcgcggtagccattccaccgctcctatgattatgttagaagaatcaacataataccagctggaaaatacatacgcgcccgcaagaaggtgcacccaagaactaacagccttcttggtcggcatctcaacagggataccctcttctcctccatctgaaggagcatactgagtttgagcatttccacccatatttgcgtcgtaccttgagaagagtgagatcgcgaagggcgagtcccgacactttttttcggcgatatgaatttccgtgatccacgtcgccagatcacgtgtatagtcatattatcacgtgcaccctctattactttaatccagtgcaatggaaatatctacatatgaggaaggctggaagacttaagtaattgaaacagccgattttcactgtagttatatatatatatgattggcacataaagtacggagtactctttgcacattatgattgttggccttggtgcctgaaccgccaggtcatctgaccgccctggcacggtatatatggcctacggtgcgttttctctctctgattcacaattctcatcgcactaaggccaatgtacataaaccagtgccaagatgattacctcatcagagcaaggtagacctcagaaaagaaggagaattgtcatttcctgtacagaatgtcatcggcgcaagcaaaaagtatggggcaacacgaaagcgcatgaacaaggaaaagaaagctactaaagattgaatagtgtgaccgccagtatccatgctgcaactgcagcaagcgaggaacgcaggtatttatatttataatagaggcaatactgcttttggtctgattggcgactgcaggatctttgccactatgacgctttaccaaagaactgccaacccacccagggcagttctggggtggatagccccttggaaatcactaccaacagcaaggccatgcatttttacccacctgctagaccgggctgcgagcgggctagcgagtctgaggacaagatcagaaattttggatattccagctacggcaatcacaactccatgagcttattacggaccgtagagctttatggaggccgggccaaaggcttactgagcccctttcctacaaaccagtcacctttatcaagcgaggcagatcgcaagtacagggaattagtccgtcagctgccctcgcagccctgcatcgagatcttggttcaaacgtttttctccgacatcaattggcagtatgacctactcgacgagaaatcctttagagaagacctagatgcgtggggaaagatctcatactctgaccttcaagcaggcttcgcaagattggcgctgggaaccattgtgtttccagcgttactatttcaagtcctcgcacaagcacttctttttcactcccctgatgatgacatgatcaattcgctcatcaccatggctgaaatgaccttccatgatcttggggccgaatatagtgatacgggtgttgagttactcgcggttctgggaaaagaggacatcacgatcgccacggtccaagcaggtatgctacgtgcctcgtttctgaaaagtagtggcaaagttattgaatcctggcatgtacttgggacaacaatccgtgatgcacaggaaattggcctgcatactggacaaattatgtgtggacaatttccagttgggcccgggcgcgagagacaaaacatcagtctcgttggtcacagagtttgggtggtcttgcatatttgggacatccatatggctgttgttcttggtcgaccgattgccaccgatctacagatagatcgcttcgcttgcactatagaagaagacgaaacgcggcgagaactattctcgcattggcaaaccgagactaacccccctcgaccatttgacgtcatcctcgccggctttaatgtagcctatcgatatttcaaggacatccacaaattggaacatcacagtgctggcccgcaagattatcctacggtcgaacatattcacggtgcaatcaagagaaactcagaaatgttaccctcttggtgccgtcttgaacacccagatacaaagtttgatcggatacaagggtgtcaatggttacctcttgcccgggaaggactgtactcactcattcaccttgttcttctcgcacttcatcgaccatacatattctctgtggccaacagtcgcacggaagcgctcaaagctggagtatccattcttcgtgcacaggaacgactattccagcaatcccagccgcaccattgcaaggtgttcagtccggtctacgcttcttttgatgcaattgttctccttgcagcactctgtcttgtttttccgaacgagaatcaagaactacgagcagactgtatcgacgttgttgaaagagggatgcaaagactgggaatcattggtcaatttaattccatggcaaagtcagcacatggtgttgtctgcagcttgtaccgtcgcctaacgcatcggttaaacctccccggggacgttgagcgagctggagcattttccaacaacccagaatggatctctcccaacagcgatacatttatatataacgggacactgtcagaactctcttttgatgctgttttacctccgcgtccaacccatgacctgttcttcaaccatatttcaagtacacaaattcctgttatggcgacaccagaaagtttaccctttgacccgcttagtgtgagcattacagatagttggaattttgaaggcgtcttttcagatgccagcttttggagtcggatgaaccagcctaatcattgaaaatgtacctatcgccgattgcattctattcaactcccgcaaaccagaccgcattgtcccccacattgcgatcgacacaatccagctggccatagtactggaagtgggaacctcgttgtttcagatcaacttcttttgacttgtggggatggactcctacttgcgcttagcagcagccgcattcagacagttgtcaccgtggatgagcagcgccggcttgtccagcttcgccacgacaacaatgatggtctagctaaagggcttgctgagctttctcaggtcgcgcttgtgcagggcttctcactgttcgcgggtgggcattttcctctccgctatatcggtaccaggcgtccatgaaacacacccagcgcaaattatgtggatgtagatgtagatgtcggtttcatagtctcggtagtatccagagaccgaagccacgcccccggttatcgtaggatgccacatccatggactcggccatcttggcaaataccgactaggatgagccgggatgcaccaagatcgccgcgctccgatagatagtcaagtcctgcgaccatgtcctcgtcttttatgttgggattttcagtcgtcaagttcgatatctataaaccccctccaattgtttgcatggcaactatgacgcattagattaaatgaacattccaatcatatcaacgttgcgatctccattttagtactccttacattatcgccgataaaagcgggtcaggctggacccttaacgccgatgaaccaatcaaagaagaattgaactgtggggattatgcaacaatcgatctccgctggctaccggatttggcaatgtgcgatgtacatcatacagtgaagctgggcgcagatggaggggcaagacttatataaactcaaagctgtccgctcgctcacagaatttaatctcccactacctgacttccaatcaaacaagcaaaaatgacacccaaggtcctcgttgtcctcacctcctatggcaagttcgccgccacaggaggttcaaccggctggtttctggtatgcacctctgactgcggctgcaattgagaaacagccattccgttttagatgttcacaaatgctgacgatgttttccaaaggccgaattcgcccacccttatgaggtcctccgcaacaaggtctccgtaaccgtcgcttcgcctaagggtggagaagccccattggaccccgcctccgtgaagatggctgagtcggatgacgtgtcactggctttctttaaggaggagaaagccctgtggacgaacacgcataagttgtcggatatactcccgcgcgccagcgagttcgatgctatcttttatgttggtggtcatggacgtatgtttagctcctacatctaatcaaaatatatgttctaacaaaatgaaacagccatgttcgacctaaccgaagacccagactccttggccttaatccaaaccctcgcggccgccaacaagcccgttgcagcggtctgccacggaccctgcgtgctgctaaaagccactgcgccatcaggcgtgcctctcctctctggcgtgacggtgaccggactcacgaatgcagaggaagacgccacaggcctgtcctcggttatgccgtttatgctggagacggagctgggccgtgtcaccggcggcaactatgtcaaggccgccgagatgtggggcgagagtgttgttacttctaaggccgctggaacagggtcgattattattactggacagaaccctgcttcggcgccaggcgttgcgaaggagatattgaaggccttggggttgtaaaggaaatttattcaaatgtcggtgttaccggagaccccaacgaatatgcagaataggaataaccatctcacttgttctggatcatatgtattcaacacgtcatgcatgtctcatgatttaaattgggtttacagattccgtaggtagaacaaattaaatctgatttgacgtttgattcttttcatctttaaaccacacctggacactcgataacaggtgtgtataggagctcattcagtattcattccaatcttaatcattactcttgtaaccttgttcgacatgtcgatggtttccagggtcccttttcagctctcaggccggtatgccgagcgaaaccgatgagaagttctcaacggcccaggcgactcacgtgtaactggaattcaaatcatccaagatgaaggtctagttaacaaatggagtgacaaggttgttttggtcactggcgtttcatctggaattggtgttgaaactgtgcgcgtcttggcatctaccggggcgactatctttggcacagcccggaatcttgacaaggcgaaggaagccttgaatgatgtactcgatactgggcatttgaagcttcttttcatggatcagacagacctttcgagtgttcgggcgtgtgctgcggagtttcgcaaagagagccccaagcttaatattcttatcaacaatgccggggtaagctagtcgaaacaaatttctcaaagatcgtccgcccactatttgatcgttataggtgatgaataccccagaaagtcgtactaaagatggcttcgaactgcaatttggaacaaatcacctatcacatttcctactcttctatctactgaaagatatcctactggaaacctcaacgcctacattccattctcgtgttattaatgtttcctcgtcgggccactgttatagccctatccatttggacaatgttaactttgaaggaaattataatggatggattgcttacggagcgagcaagacggctaatatatatatggctacccaaatcgagcgtttgtatgggacgcaaggtcttcatggctatagcttacatcctggggccttcgtgagccccaacctccagaaatactcacaggaagaaatgaaagcagcgatgcaggacaagcgcgccctcgcgtatttgactagtatcgagcagggctgcgcaacgactatttatggctctgtctcgagtgaactggaagggaaaggcggattgtacttggaaggagcatctattgcagttcatccggctccctcaggcgcggatggactagaatatggatacagcagttgggggtttgatgagtcaaaggaaagggagttgtggaagttcagcaaatcttgggtaggagtagagtaaatgttaaggattatcaacatcaccatatatataatcaagtggatgttttagttccagagctatttgcttattgctagtattcaattaattgacacgataaatcgatagaaaaaggcaagaaaacattgtataactcaacaagttaatgatcatacagtgaagaaaaagaagacattttgttacgagccaattcgattcagaagaaaagagtgcaattcaaaccaaattctaagtacaaagaagaaagaaaaaggagaaactatttgagtgcgcgttcttcccttctcatacccttgcgtttgttctcgcttaatctcgtttgtcaatttgggaaggtgtgagggcgaggtcgttcctgcctcgtctggcaagtacgatccaaagtacgatccttcccagattgtcacagatataatacattcgcgcacatggtacatcaaacgctgcctgaggaaatccgaggaagatcagagtttgctggagacaaggtagggaatgttcttggcctcgtatagatctttgtgctcagacttgatgatatccgcgccctagattatattacgcattagtcttaccctgggagctggcggatctgtgactaaccttctcgccaatcatgtagaccgagttttgaatacggcaatcagggatcacggggatgatagaagcatcggcaattctgaggtttcggactccgtggactcgcagtttggagtcgacaacaccctggtggatgctcttcgagagacgtgcggtaccgcatggatctgtaaagtaaatcattagacttgtttcgggacattggaaggggtgatctcacggaatcctgtctggctgcgatccagaacagcccggttcatatcatcatcggaatcaaggggcatcttccaggggtattctgaaataacaatgtccttgaatccagctcccgtggtcaaaagatcatatgtccagcgcacaccctcccgcatggccagaatgtctaagtcattgccgaagaagttgaggttgatattcggctgtacctgtgcgttcgagctgtttagggtgacttcaccttcagaaaggggccgcagcagatcaacaatgacagtcatgtgatttcccttgtcaggcatagggtaatgccactggaatgcgctgctgaacaagccgacgaagtccagctcgaagtgaggttgtcctgctggcccgaaaggatccaatcccccgttggcagccttagcctcgagataggcagggtacttttccaggcgttcgtcaattcgggggaatccgacaagttccaggaatccggagcttgcaggaccagtcttgtccttctgataagtggacagcgccttgtcattgagaggaccaggcctgaggatatggttatctaagctgtatccatccttggtttcaagaacgaaaggtacgatgggatggtcaagaagatgctggccgacgtgaggggattccacaatgggggcgattccgtgttttgccagttccgctgctgggccaactccgctaagcatgagaagcttaggagtctcaaagacaccttgagagagaatgacttctcggcgggcgtagacgctgatctcgtgaccagaagcttcacttatcacagtgacaccggagcagatgcgtgtggtagggtcgatgagcagcttcttcgagttaacgccatagaggattgtcacgttaggcttattcttcagataaaggaagctaccctggcgttcaccctggtggatggtatcaacacaatgggttagacctttcatctcgccggagtagatatcctcgctcaggggctggcccttagaaacccaggcctcagtgagcgcatcacggaacggcttcatctccggcaccaagtcggcatgggagatttgcaaagggcctccggttccaatcttactcagttcggccggatacagcttctcgtcgtcatggtaggtggcacatttgcggaggtgctccacacaggaatcccaattccagtcatggccaccgaaggcctcccagtcgtcaaaggtaggcttcgagcccggaatccaggtgaagtagttggcagttgaactaccaccaagagcctttccgcgagtgttgggtttttcaacacgctcataatcatcgcgcttgatcatagttgtcttgtacgcccagtcgtacttgcttccgcgaagggtgaaagctttcgaaggggtcgtgatttgctcgatctgatcagggttggggatgccggcttcaacgaccagaatgcggacgctggggttctcagcaaggcgaccagcaattgcattgccagcagtaccaccgccgacaacaatgaagtcgtactcagagccgttggaaacaaaagccatggtttgggatttaataagacttgtgtgtgtgcgtgtgtgtgcgtgtgtgttcatagcaaaaactaacgagacatcgcgtggatcttatattccactcttcgcatgtctccaaatagaccatcttgccgctcttgccggatagtaagagatgtgggaaatggagcaacatgttttaccactagggccaaagtcctgggtatccatttgggggatagaggggccatcttactgacaagagaggcccttgaaccttgacttggtagggctgacagaaagggtaaatttgagttggaggtgttctagaagggacttagctccgaaagtgacgttttcgacccctcatgaggggaaaaccccttctccgcacgagctttgtcagatttccagccaatcagagattcggcatatgtcgccaggaacggcaataactcggccgggtgtcggtaaaccgcctgttgcaaagcatctccactatattgtaagctttccaaacccacttgttcaaaatatttggttttgtctcaatcccctcacgttaatatggaatgatcaaatgatttggagtgtccctcatggggggtgctgtcaaggtcttgactcacgtttaagatccagcccaataaaagccaggccgtttcctagaatatagagtattcacaacttatcatatcaattgaatatcccttgtacaaccaatcccaatgccgaaccattttaccttggccgaaggtatagtaccaaatatctcaagtcaacgttcccatcctgacaccagacaggtcaaccggttgcggatccatccgtcagcactacgttgcctacctttgggggtggtggcctcacaacattgggtgacacgcttctcattgaaacactttcgcatttcaaccgcgaacgtatacccgaaaggtctgatatcattcaacataatgcttggaaggaaaagatatcctaactctataaacagagtcgttcatgctaaagctgcgggtgcatggggagaatttgaggtcacaaacaatatctcctccctcacgtcggccaagttcctcaatggtgttggaaagaaaacccctgttctattccgtctaagcaatactggcggtgacaggggcagtgcggacactgttcgcgatgtgcgaggctttgctgtcaaattcttcacggaggaaggtaatcatgatattgtagggaaccacattgtaagtgttcaccctaagttcttacttttcatgttctaatgtctccgaagccggtattctttgttcgcgatcctataagatttccttctctcaacaggagccataagagacatcctgccaccaataggccagattggcccatggtgagtgctaatcaaagttactgagttgcggatgaagctaatcttttagttctgggatttccactcaaaccaaccggaaagtgtccatgctctgatgcacctttttggcactcggggtattcctgattccatccgtcgagtgacaggtttcggtgtacataccttcaagatggtgtcagctgatggtggcttccgctactgcaagttccacttccgaccaactcagaatatcacacacttttctggccaggaagctactcgcatggctggtgcaaacgccgacttccacaatcaggatttgtgggatgctattgctcggggggacttaccggtctggaaactttacgtccaggtcatggagcccgagcaggctgaaacctacggccgtgctctgtttgatatcaccaaagtttggccccacaaggaattccccttgatcgaagttggtcaaatgactcttaacagaaatgtgggtaacccattaccttagacacgaagcaagtgctaacaagccccagcccgagaattattttgccgagatcgagcaagccgcattttcgccttctaacatggtgcctgggattgcaatgacacccgatcctagtaagttcacactgatgtggtcgccagagggggataaaccactaaccattcttatctataatagtgttgcaggcacgtatgttcgcttaccccgacgctcaacgataccgtctgggggtgaactacacacagcttcctccaaaccgtgcaatatgccctgtatatgcgccattcgagcgcgacggcacaggaactataacccggaactatggcggtgacccgaactatgtacggagctcactaggcgctggtattcctagccaggttgtttccaacgtacgacacactgagcgcatcgcgcataacgctgtcctcggccagaatgagattctagttgatgatgaggatttcattcagccccgagagctgtggaatagggtctttgatgagcccgagagaagggagtgggtgtcaaatgtgtctgagactttggaagaagtgcctgatcagcttaaggatgctgtcattgccatgttcagcaaggtggatcctcgtattggccaattgttaaacgataaggccaagaacagtgcgcgtctttagctctttggttacttttgacactagatgcaatgaaacacgttttctatactcatacgactctttcttactgtccattacacgcaggatcagtaataaacaactcattgatgtgcaagtggtatcacatggtgcttgccctaggtgcaataaggtgttagagaagagaacaccatggggtgactactagaagaagaaaagaacattgaaggtgcctgcgtgctatctctacctcaggagtggttttacggatggataaaatgtccgcttagtcatcctgcgctactgttcaccgattaccacgtgatcacgggtcctacctccacactgttgtgtccctccgaggtccattgtttgtggccacccgcacattataggcctttcatttttttgttcttggcacatctcgcatcccgtccctgaagaggctagacaccacttatttgaatcaggatgtcgaatactacatctccagcctccctaaatgctgcttcccagggtcatactgttgccgttagtctacttctaggggcgggagcacaaccagatttatgtcatcctagtggtgaaaggaaaggcagtccactgaattgcgctacccgaaacgctaccgatattttgcttcctaaatctctgctcgattttggcgcagatgtgaatgccagtggaaatgatggcaagaccttattcatgcggcaagaattgacaatgctggttttgctatgctattattggaatatggtgccaacatcaactcggtatcagccgacggatcaactcctttgaccaccgcaattatctacaacagtcataatgttctacgattgttccttgatcgatggcatgagtattcgatctgcccccgtatgaagggccccaaccttctccaggtcgcggcactatatgctgatcctgctacgctgccttgagcatagatgcggaatacgagaaagataaacaatgtgcctgtgagagcccatagtacaccctaatatcaagaggtcagttaggtatactaaagcaatattgccattccgttgaatacccactaaaaagactgcctcaggaactctgctgtgctggtcatcaaactctgccattatgactaaaggttcagtatgaagttctggatagatctgtcaaacagtaatatgacaagacgtgagaaatatatcaaccatggaactatatcgccaagagatcagatatatcattctttgttgatctctcgctagtgctgatttggtcatcctggacataattttcgaccagctcagttctattggtgcgggtaagaaaaagcatcggttaagtcctttgagaatatcaagtcagataccttgcgccatgtgaattctacttgaaatgagagtgccgggacttcaatattaacgccactgtcgttaatactatacactctggcgaacaaccatggtcgtgcagcttgaatgtgatatcgaaagactcaaaatccgatgatagctttatgagtgagtagttcgttccgctggaacaattatcaatatggttcacataggacggatatagtgtatcttggcccccgcttgatctgttcaagtatggtgcagccattcatcccatctaggaagcagcccacttcgtatgagtgcagtggcttaatcaaaacggacatggtcggaaaggcatactcacgatgattgcacaactaaccgaaaggtcaagggtgtcaaagaagtgacatccctactgagtctctcgatatctccgggagaccaagaacgcaaattcccatcgagctcggaccccgacgaaatgatcttcgtcattgataaaattcgaatactttgggaagccaaattactccatgtccacgagcgttgtgatcgcccactctttcgggtaatggcgcctcaatttcgacttgcttatcgccgttgttaagtagcgtacatcggcttcatggcaggctccgaatcggtttctgtaagattttgcagtgcgatattaccagaagaccactcggagtttgcttccggggggagcgtgatcaaaaatagcagtaaataaaaataccgattgatctcagcagcgatttgtacgatttcgcgtaattccgtaattgccacgggtataggatactgaataaatatcgctagtcggatctaaaggacctaggttgatactagattagatatgatccggctatcacaccatgggttgcttcgatcagaatctcaaaggataccatcaaacaccaattttgcacacttattcggtattaatacagaaggtgctcgggtcaaaatagaaagagttccaagcaacatgaaggtataggcatgggcagctttgacccgaacgcgcagtcttagatccgcattgagtgcgccacaacggaagtgcagcaaacccaatgtgacaaagaaattataatgcaatcccgagtcctagatctccatgacatgttcttcgtcctctgatcgccctttcccctgtattgtggggatgtggacgttaatctcatcgcgaggtgagtttttcttcgagcaaaaggagaggagaagaaggaggaattctctactagcaaacaagatctagctacggagtaaatagctaggtgaagccctacaatctaggcatcagcatgtgattggtacgtgactgtcataatagttctcgatgtcttagtcctagttgatataatattcaaaaatacctgtagatccctataactggttaaaaatatatataaactgggggatttgacgattcttaatgtcgtctcgagtgatcagccgaagtggtagagttagggttgtcaagggactgtctggctcatctttttgtctctcttaaaatggagtgagctggtaaacttgaagaaatcctgagccccggttgctaaagacgctgaaagagaaagcggtgacgatatccgtggagatctagaaggtggagacccatggaatgtaagtgggccgccccacttaagcttggaccttccgtggtcgtgatagccggatatatcaggcaccattttcacttcatatttacatgattcaggttgttctcgttcttcttcttctttctctctctcttctctgcatttattagatcgtaattccaagattttcaatgcacaccgacagagcaatatattgtcccgaaggctcaaaaaatactagaccgcctgaacacgcagctgccatcctcagtctacctaccacggcaccctctgctcaggacaaatatgcactcatgcaagagtgtaaagacacgagatcaagccacgggcgaacactttaagtatcagcatatagtaggctgcaagccaaactgtgcaagatatcagagattcgacttgtggaagcttcggacagatagtttgtatccaagtttcagttgttattccgctttaaaaaatgtcgagatgagaaaggacataccggagttactattcacataggtaactctaagagtaatgttgtaaggatatgacagggacccagcgaatgcggaaacccacctgtgcaagcaatggcgagccatgtgtatactggaagatggcaactagccttgcatcaaaaaccattggccctttctaatgttatacaagtagtacttggcacagaaggagttcttggacgcgtggacggaggtcttgtgtcacctgtcgacatttatctgccccggtgggttacctgtcaagtcacaatggaaggaacgagctcagaggaaagagcgaaggactcacctcccagtcaattgcgccatcgcacaatccagaatctgtctactcactctgctttctctctcctccctactttcttcctcattcttcttttcacccgttttgtttcccatctaaagcgacacgaacagtagaactcatcaatcttttatcatcatacgagattccaatcatgcctgacccacctccaaagggtaagggtattgcagtatctgatccagagccgatcgatgagaaagttgtcacggctctggtaaaggatgaggcccaagtcaatggcaacgagttatttgctgaaaatgaccgtggctctgaagatcttgtgattgtcactggagctgatgtggctgctcatcttttgcctttgcgcgatgacttggaccctactttgacatttcgcgctgctatcctgggatccggcctcgcggcctttctggctgtcatgacccagatctacagtgtaggcgaactcgcatatcatctcattcttcattcccacagcactgctaatgaatatacttctagttcaaaccaacccaagtcaatgtctcaggcgttttccttgttcttgtttcctactttttcggtaccacctgggccagattcctcccccgaggtgacaagtttgaggcgagatggagggcacgaggtgagcagggcagactgccttggtggattactgtcatcaagtttgtgaatcctgggcctttcggtctcaaggagcattcgatctgtgtgatcactgctacagcagccgggtacgtcacggatgcgacgactgtattcgcggcacaaaagttgttctacaatcttcctttgagtcccgcaacggtcattctcggcattatctctatcggcctctttggatgtggcctctgtgggttcatgcggccttttgctgtctgggatgtcgaggctgtctactggggtacgctgcctgttgtgaaatccatccaagggcttcactgggacacggtcgaaaactccaagccactgaaatacttctggtatgccttcacgggtatgtctctttacgagatatttcccgcatacatctttccatggctcaactccgtgtctattccggtatgtattctatcttttagcaacgttacttgcgccgtacctgactagaccccgaatgtctagtgtctggcttcacaaaaagcaactggtaagaagggtgccatactcaccaacattttcggtggtgccacttctaacgaaggcctcggtctcttctctttgtccttcgactggcaatatgtgagttggggtattacgccccagtgatactttatattaaccaatgagactggtcaatacagatcgggtcaatttcaactgctattcctctaaagctgatacttcataccaccctgggagctggcatcagcgccatgataatgattggcatctattacggaaatggctggggctcgagatcactgccttttatggcgagtaaccttcttatggccaatggaacaacttatcccgtgaaagaggtgtttcctggtggcttgctcgacaaatcagtcattgaaaaatatggattgcctcagatcaccggggcctttgcatttggtctgttcacggccaatgccgcagtgagtacaatacttctatcccgaaccacttgctaagcattacctagattggcgccctcattctccactgtatccttttctggggcaagggcatttggagggtatgtcaacaagcaagggaaggtaagcataatgacccacaccacacctacatggcaaagcactataaggacactccgtggtggtgcttcgctggcattctcgtcgtcagctttgtccttggccttgtagtggtgatcaaagagaatatcactcttccagcctgggcatacgttgtctcgctagcactaggagttttcattacgccttttgtgagtattctcgaacacgaaattttacaatgctaatattatgatccagagcactatcctcttcgctcgcttcggcaacggcattgccactaacaacctgtcgaaaatgctggctgggctcatgcttcccggacgcccagtcggtaacatgtatttcgctgcttggtcgcacaatattgtcatgtcttccgtctccgtgtccaacgacctaaagttcggcgaatacatgaaaatacccccgaggatcatgctttggacccaaatgtatggcatcatacttggcggattcattaactatgctatcttgacttccgtcatttcagccaacagggaccttcttgccgagggtaacggaaactcctcctggagtggtgcgaccatgcaggctttcaacactaaggcagcctcctgggccttggccccttacttgtacaagctcggtgccaagtatgaggtgattcctattgccgtagccgttggtgctgctgcagtaattgttcatcgggttttctatcaggtcagcaaacctcaagcagaccaagattgttcaactagttcatgctgacaccattttacgttagttcgttcccaaaatcggacggtttgatgtttcagaagtgaacctaccacaactcatccagtatgccggttcttatacatcccagacacaaacctgcactgttctcagtgggctactctgtggcttgtttacccaaggctaccttcggaactaccacccacgcatttacaaagattactcatacgttattgctggggccttcgacgccggaagtctgttggttatcttcattctctctttcgccgtctacggagcgggtgggccatcccatccattcccaacgtggtggggaaacaaccaaaatggacaccttgactggtgtcctgtttcgaagaaatgacaacgggcacaaagtcggtctcagataatggcgcatgacggtcgatcagagtcatgaaatgtcttgagcgcaaatcttttttttccagcgccttcaaacatttgttgtccccctggaaggttgatggtgacaaccttccggtaattggatctgtaatggatccttagttttaacataattttcgcaacggttatgaatttagcctagatgaacaatctaatcgttgcaattatttttcctcgtctatattgggtcgtatatataaagtattcctcatggtagacgtagcgatatagatgataggtgctttttcgggtcttattgatccctgaatgcccgattgtttcctaaaaggattggcaagatatctgaattgctatcagagaggcttaatattcaaggtaccttacctacctcaaaatgaagcttttgacaccatacaaatttatgtatcgcgaccttttatgtggtttactcgccatatcatcacattcttcttccaagattagatgtacagtcggaaaaggcgggagaggccttaatttaaaggtaattgccaaaacgagataagcatcggcggccatatttaagcgatgccgaagaaccaattacaccattgaagacattaatccagatggcgtgtctaaatttccgaatgatgcaactcgcttggaccccgcctctagagctaccccaacatgtctgagtgttatctaacaaatgacaagtcattacgaatacaatattgaattagtaccaacgctaattgtccaatacagacgttctgctagagctaggtcgcttattttgcgattgtcttattcatgcctgcggtcacaacataacaactcttcctaatgcataattgcgtgatagtcaatgcgacaacgtcgcatggttataaaaggctgaagtagaccgtttcatgctctccttgataagtttcccaaggttccgcctttatctctttctacaattccaaagatgtcgataaatggaataaaaacagcgcatatatctgctagtagttcagatggctcggacgaagagtggcagaagagtggacgtaacaagggagaaggtacatttgagtccagggagggtcatcacttctaccggccgattgacagctatgagggactgcatcgctgggatccgaattttcaatggacggaacaggaagagaaaaagattgtcaggaaggtcggttaaattccataccactaatcaattatcaaatgactgaatttggacagattgatgctcgtgtctgcacgtttgcctgcgtgaccttctttgcattgcagctggatcgaggaaatatcagccaggcactagcgagtacgcttctggaagatcttggaatgacaagcaacgattataacttgggtcagacggtttttctgatctgtttcttgttggctgagatgccgtcacagttgctctcgaagagaatcggcccggaccgttggattcctattcaaattgttgcttggagtttggtcgcggcttgccaggcctttttgaaagggcgtggctcgtatttggcctgtcgagctctgctaggattcctagaaggcgggttgtgagtaattctccttcacataatcttaacgtgggtctgaccgtgtttttagtatacctgatacgattctttttctgtctttcttctacaaatctagtgagcttccgaaaagactgacctgtttctggatatcctataccgttgccggaattatcggctcatttctagcctttggcttcctacacatcaaagacgccaacggcagcggtgcctggagatatttattcgcgtacgagggtcttataactggcgtgattggaatcatcgctgcattctggatgccggcgtcacctgtacaaaccaagggaggattacgcggtaaggacgggtggtttacagagcacgaagagaagatcatggtaaaccgcgtgattcgggacgaccctagcaagggcagtatgcacaaccgacaagcggtcaccccacggcgcttctgggagtcgctcaaggattaccacgtgtggccaatctatgctctgggtctcatttggatgatacccagtacaccatcccaaaattacctcacgctacaactgcggtcccaggggtttacgacgttccagaccaacttgttgacaattccagcagctgtcattgcgattatcaccatgatagcaattacctgggttgcggagcgtacaaaccagcgccttctctggggcgcagcagccgaagtctggaacctggtactgctcattgcgctggagttgcttcctcagaaaagcatgccgtggcctcgttgggcgatccttacgcttcttgtcggtgggccgagtattcatcctgttgtggtcgcgttgacttcacggaatgccggatctgtgcggactcgcactgttgcttctgcgttgtataatatgtctgtgcaagtgagcaacattgcaggtgccaatgtgagttcaattccttgttttactctagatatggatagactatttagaatactaacatttatgaacaggtgtaccaagcaaaggatgcgccatactacaaaaaaggaaacaaagttcttattgcattggctgtcgccagtgggttccttttcatcttcgccaagttctactacgattggcggaataggtacatattcagaacttgtaaatatcaatatggatcagctttgctaacttataacagtcaaaactctgcaaaatgggatgctatgacaagcgagcaaagagagatttacctgcgtgaaaacccggtgttgactaacaagaggtacgttgactagcgctgcagaatataactactagcagtgctaggaactgactatggtgtatagaattgacttccggtttgctcgttagagctatctgatcaggaatttcgagaaatttgcaatattggacatgggtgttgcgatggaataaacatgcagatcgctgttgttcatagaaaatccattatagtatcatggctttgtcaaagaaaggaattcatttacgtcacagttaccaagaaatgagatttgaccttaagatagcatgaaataattcaatttcacaagaagttgatatgcaggcctatcgcgaatagtccgaaattgcaccattgtggctggaatgaggttgttcggagaatttgggcaccatacattgatgttacaatatgccatcagggataggcttggacacgtctttcttcggagaatcatgtacggagtacatactccgtacatgattctacatttccttattaattggggagattgtatagatatcaggaccctgaacattcaatcaccgccttcttgattggttgcaataccgaattctgctataatctccgacactgtatagttttctgtcgtatgaagtagttagtgatgacatataaagcagtccaaactacatatgacaaaagtgacttaattttgctcggggtttacataggtatctaccatctcatacttttgtacggagtatggggagtttgacacgaaagcggtgtataaaattgtaaggcggtataactagaaagcggtacgtgtcaaggcaggcattatccaaattaggaaggcggcgattcaatttacaggcagaggggtcagagccaagggggttcatatcaatccccttgatttacgatttattcaaagtggactgagattgttgagacagatcatgcatcattatatgaactcctcattctcccggcctatttaaacctccattcaagagaccctcaagcctttgattcactctctggaatgtaaggtgtctcataagggcgctctgcctgtggagtaatgcgcgccaagtggcgacgctcaccagttgtccaatcaacaattgcagaatgagccgtgacacggttctatttatatgcagacattagttttttgagccgttaatctataatcaggatttcactcacatcccagacaacaacggtcttcggagcccatcgaacacgagcttgataatcaattccccgacccacatgagccagcaggaaacctagaagggcatcgctctcctcctttttgagaccgacaatactgcgagtgactagtcttggtgtaagcacttgcttttctcaaggagcatgggagtatacttacagccaccattgacgaaaagcgctttctcaccagttaccggatgggtgcgaataagaggatgctcggtcttgaccgggtcccgtctatcgactcccccacgctgtagactaaactcggcctgctcaaccccggaatgcacagccttcaacccgtgcagacgctccttgagcgctggcgaaagccgattataggcctcgacttggttgacaaaaacagtatccccgcctacttcaggaccgtcaaggaggtacaagaacgtggtaccgggtggctgctgctcatatgtgacatcagaatgccatgcgacactgctgttcttcgccgcgagatattcatcgaattcccaggaattgttgttccggtgcacgagatgaatctcgggatatccctccggagctccgctagttgggtggatatggtggcggccaaagtatcctccgaaatcgagggcctcttggatgggcagatcggcgagatcttggtctcttaaaggcgacaactttgcgttgggcgacgagtagagcgagttgatcctttccggcagcggtgagcttgcttaactgaacgcctgtaacctcagagccgatggttggagtcaacttttggatcttggagccttcggtgaggaggtctttgaaggaggggtcggcgtcttttccgtggtcgacgtgcgtaaagggttcaagaggagggtactttcctccatagtcccatacaggcaggtagtttggatgctgcatcattgttagggaaagctatatgtgagagactcaaaggtctagccatgacgtacactagcagtagtctttcccccttcctcgtcaattattcttctcactctgggtttggtctcggttgttgaaggagcggcctttacaggaacaacaacttccgcggtgggaacttgagcaatagatggtgccatgttgtgctaagagattggtagattttgacgttggtcaagtttgagcaattatctcagggatctgtaagcaccatccacttcaatatatataactttcaattccatttgcttcgcgccattttgtcgtagaatcacgtatgaattccttggtgtccgatatacgcgagagtgataagcatcatgtgagaggatcagatacacaaagcacatcaacattgatgccgtgatatccgttctatcgaatgactcattcagcatcataagacaacaaatagatcaagcctgacgtgctataaccgacaataacatcatttacttgccaatgggaatggtatagagtgtggtcttggatgattgataatgtcgagatggcgtgatatgatgcaagtgacaaccccgcaaacgactctaggtccatgatagatgcatgccaaactctgcagtagcgatgacagacgtggcatttaaatggaaagagtaagaactcgatggtaggttcattatttgtttcccgcaaggcgggtaaggttgccagtgatgataccacttaccctaggaataaaggcttttggactctttagagagaaaataggcacaattcaaggaagggaaactagagagtttggtatgaccgagttatattgtgatgctaggtacgaagtgcaaatctagtctgtgctatcatgagtggatacccattagactgactgcctttcgcatcttattccacttctgtgttatacgctgaatggatcattgtcgacattaatttggctggttcgactcttggctttcccttggcgcggattaggcaaaatatttcaggatgctagatgtgaccattaggctcgataggtttgactggactgtcagttctcagtcgcgccgcgagttttattgtctccacggagcaggcagcatataattcagtcagatgcgatgatcaaaattgaaggatgctaaaagtaacatgtgaggtactgaaaaattcgcaatcacattgaaagtggaagtcgaaaagtgacttgctgattgaggagtcgatctcgggaaggagttagcattatccgaggccacgtggtctagatcacgggttgtttccccaggttctccttccgagtcacgtgactaccatccacagaaactataaatatctgacttaatttcaaaccgaaaattgtctaccagaatcataggaactccaaatccgatttcatttagaggttgctaaaagtataatcatagtcaatcaatcctttgcttgctccactggtctaaatatatatatctcaagttctctatcagcctatcgttttttcttctttcattctaatctccggccccaaaaagagagcgaacgaaaagaggagagaaaaatatagttgtaaaaaagagtctttgagcatatgatagcgatctatctgtaacaacccattccatctcaagtttcccttttctctcgtcgcccgtaagcttctttgtttttatagatagcttgttcctatttctttaagtatttgtaccccgaatcgcatgtagattcgtaccgaggaattttttcgagactcaactttctaagaaatatatcttcaacatgtcggaacgatacaactttcgagtagtcctcgcgtgttcggagactaccgccccaacaccttggaggaccaccaacagatccaactccacgcataaagctcaaaatagaagacctggaccttgacaaatcctacattggcactttgatgccacctaaacggccaccgaggccaaagaaaaccagaccatggaccaaatggacaggaagcgagcttaccgatccagctaaactttctcgtggctggcacatgaatgaggacgatcttgagattgagtgagacggccttgaatctaagtgtgcaaacaacgagctaatcagaactcaatagcgatgttgatggccaaatcaaaagatggcatgagagaattgccgagaacataatgcctcatgtttttttgccaaaggctggaggaatatatggctacaaaggcctaaaatgagtgagtcagctatattggtattgcttgtgtgcagattctcaccttgttaaactatagccagatgaggttcccggggtctgaagagctcagctgggatactattcaacgggtgcatcaattggaggctatggagacagagctcgcgagtgccggggatgaatacgatcgacttccaaacattgaggctattttggaagcttataaatcgggtaaacttgattggtatactggtctcgttacatattggtcgaaggggtcccggatctgtcaaccaagaccatttgactgggatgaatttgaagcgatcagctcccactacgaggatcacaaaggattatggaccgaaggggtaatcgattcattctgttttccaaaggtaactggctgacgaatgatatcagctcaatatttctgagaatgatgtttcctatggagctatcaccgcaggtccatgtcgaatctatacaaagctgactcgggtgagatccatacctattatggctcaaacctcttccaagtatttctgacttttttttatctagttgacattagcactccgccttccaggagtaccgtgatttgccgagttggactttattcacaatactggctgcagtaaaatgtccatctatcaaggagatcttaagatgcttcttggtccttttggcgggactattgggccacaaataccggtcatctgcatgtcaacgtctcaaacttgtaatggccctgtaaccaggcaatttattgaaattgaagtcacaattcttgatcaaggtcgccagagaatgaccgcttggactagaaccacgtgctgtctcaatccaggaagctggaaatacaagagcatcccccgactagatggcccaattgtgcacgatttgttatatgtggcaagcgcacctgataactagctcccgtcgtttacacatctcaaccacgaagtctgaactggacctgccagacctgcccctcgctaccaacccaggacagtactatgggcaatctagaggtcccatgccagtcggaaaatttgccgatacacatggtggttggctaccagaaatgctcggaacgttggaaatgccgccagcagcagctggagttcctccctaagagacttataaacctgtcattccctcgccgactgttgcttgtccttgaacttagtcttgattcatttgttctttttattgcttatagtgtattgctgccccagtttatcacatttctcaattgtttgttgagcatttctgttgttatattttggcgcaaaccaagacagccaataaaatcactgttttgttatgttagttaatataatgtttttatggagtatgatagtgtatgtcccatcaaggaccgacatgccatacttatgttatcaatttccccctcgcactgacgttggtcatatctagatatgccttggaacctcgggtgtagctatagatgccgtaataattgagatagagaaatatgaggcttgtaggctcatttcgcagtccgtttctttcctatatttcaggtgtagagcaatgttaaatgctaacggtgccgatccaaccaacataggcggcccatgcagatcgtacggaacctggcagtctccctttaacccctcttcctctcctttccacctttcctctcttctagtactaatacttctatcataaatcacttccaagaactttgtataagagaaaattggctaacccacgaatggtgtcactcggtaaacaaatataatgatcttattccttattagtgttgtgatgcctcaggccacgatcgacacagggaagtcacaattcatattctcaagatggagcaatctgcgaaccgtgaaatttttgtatccaaccggccccgtgatctgcgccaatacgcttggaactatggagtagccaagctctggctgaattccagggaaaaagataatttgtggtcgcatttagccccacgccgcttcttatgcgctgcgggtcgctggtctagattggagacagcgaggtggcagctatctcgtctttttttcattttgccttctctttttcaactgttaaaaagaaattctcactgtgaatcaaagtgacaaagatagtctcaaataatgtgattctagctacattttcgtgactttcgcaaggtcaatataaattgcggaatactagcgtattgcaactagtggcaattcatcaacacttgcactacagggtccacagttaattaccaccatgggaggtctctgaaacggagagaacaatacctttgtaggaatttttcccgagttccgtttttcaactctgcttctcccaggggcctgaattttcgagctcaagtcaatcatccatcatgaccgtcaaagagaagacaagcgtaaatgacgcggagctgggaagccctggggactctaccgaggagtacgaggtcttcaagaaaaccgaggatggcgtcagcttccgcagtgttggctggttcaaggcgtgcattatcttcgtgaaggtcctctttgcgacgggtgtgctgtcgctgccagcttcactgtactccctcggtgcggtaggtggctcgatcagtatcgtcgcatggggcgcgttcaacacctactctttcgtgattctgggcaacttccgcaagaagcatcctcactgccactccatcgccgatatggcggaagtcgccggtggtttcttcgcgaaagagcttaccggtatactcttcctcatcggctacgtccttgtcacgggcagtggtattatcggagtttcaacggccttgaatgcgctttcgcaccacgctgcgtgcactgtctggtggtctttcattggagcggttgtgatcatcgcgacagcttcggtacgcaaactccagcatgtgggctggctcacatatgcaggattcatttcgatctatgccgccgttctgatcgttgttatcggagtcacaacgcgcgaccggccggctgccgcaccccaggagggcccttacgagctcggctacgtggcaatcaacaaccccggatttgcggctggcatggtcgcttccagtactatcttcgtctctacggctggtaccagcgccttcatcccggtgatgtcggaaatgcgaaacccgaaggactacaagaaggccctatacctgtgcatggttgtggttaatgcgtcgtaccttgctttcagcttggttgtgtatcgttggtgtggacaatgggtggctagtccgtctttgggtgtatgtatcctatcctttgcctgataccggtttcagacaatcagctaatttttgatttttacagagcgctggacagacgatcaagatggtatcttacggtgttgcgctgttaggactggtcgtcagtgccacgatctacttgcatgtgagtatatccctcgcaactcacgcttccggaactgacttcgctacttagatcgccgccaaatacatatttgtgcgtatcttgggtaacacgcgccatctgcaatccaacaccgtcattcattgggttacttggatgagctgtacggtcggtctcggtgctatttccttcatcctcagcgagactatccctatcttcaactacctggttgccctaattgggtccgtttgcttcgcgcctctggccatgtgccttcccggtttcttgtggctacacagcaatggtcattaccgaaagggcacactgatgcagaaggttatctacctgctgcactggggaatggtgctcctcggaattttcttccttgtcggcgcgacgtacggtgttatcattcagatcatcgatgcctacgcaacgggaatgattggtatgttctgctatacccgcaacagtgtagaactgcgactgactttttttattaggctccactttcagctgcttggacaactccagctcgtcgtaggtatgggtctttacagtcgactgcttagggatctgcccccaactggagtggtgatatatacgctcaacatggtatggatggttatacaggaattatataatgagggcccgggaggtcataatgtatgttgtaatgagctgttatggaatcgtaacaaattctgttttcctcgcgaaactctgcaagccaaacgctaatgtaggtactgtctccactaattcccaaatgcggtccctcgtgtggctcacggacgcagttccgcgaccccgggaacctacttctaactacattcggcctgacttttgtctatcaaaactttaattccttccaacgttcccgcttagaatttttttccgtcggacaggagaggctcttgtgccacatcccgaggtcctttcccagctttcatgacacataccattatgtatttcagtgttaccgaggtccggctccatcgcaaatttgtggtatcccgtgtggatccacccgcgttccacgaccttgaagttcctggcccaggatgtggggacaggaatccacgatgccttatcgcagctgctagccgctgttgatcttgaccagctcacggtacgaaggcttcattcccgtcccgcggcgctgataccattgcgggtcttcactccacccttggttcgcgtggaagcgaaggattccgggatcaaatgctcgacttttatcattgagcagaattgggactttactgacttctagaaggctgtgggtaccaagcaggtggatggtgataagaagggtatgtttactaggatggcgacatggttcgaaagcgaggtggacgattgatttttttcagcttaggtatgtgactttgtctgattatcaagaccgattaaactaaagtttgcctaagtttacgccttcgatctttccttttcacacgcggaaaatatatatagccgggataccaggcaaggtcccaacacgatcacgtcaaaacatctttggaactaatagaatggctgggtatcatattggcagacctgcagcggaaataaactcctgcatcaagatgtttcatgaagatggcttgtatataaggacattctcaacaccttgacggtaactagatccctaaacgtacatgtagattcaataacatactgctcgtagtcatatttatgccgactttccctcagcagaatcccgcggttgagacaccgaaagagatcgctgatcgttgccgcctttcgtccgcccaatgccaaccatctgcaagatttcccgccagaagccagtaggggggtcgaggaagctatcctcgtaggcatcgatcaagggtcgttcccagacaaggtcggcttcatgggccttgacgaactttgttttcttgatgattttccagatgatgaagaggggagggatgacgatttgcatggtgtagttcgaccagaaggaagacacggaccaaggcttgtatgaggtgtaaccgtagacgatggtgacgatgatcatccaaacgaatgcaatgtatgcacagtagggttggagtcgtccataataggagagggaccggcggtcaagcccctgcgctttgcaagcgcggtggaagaagatgtacgtcagactgatgacgacgtaattgatgagacctggttatgttgtcagtattgtaatcagtgttgggtagcacggattgcatcgtgatttcttacctccggcggtcaccaggttagcgaaccacgtgatgacgatggacgagctgctagaacactgcaagaaggaaagcatagggaagatcatcacgatcaggaagcaatagacgggtacaccgttgcgcgtagtgtaggtgagcactctcggggctctcccttccagtgctaagccgtacagagtacggatagcgcagtaggtgtaggtattgccagcagagaaaatggaagtcagcaagaggctaaaagattacggtcagttttagttcgtcagattcatgttattttcgatggcactgacgcgttgatgatcgaagggaagattgaaatgcccatgtttcgcatgccaatgacatacggcgatgccgaagcagaaccagaagaaccgcccgtcacgaccgccttgagttgcggatcattagcggcacaaacgatacccacagccaaggcgccgccgataaagaagagaccgaagcgaatgtagactgtcttgaatgcattcttgatataaatgcggggacgctttgcttcagctgcgaccatggagatatactcaggaccgacgacggcaaagcaagccgaccagagagatcccaagaagccttcaaagcgaccaagggcgccggtatccagatattccatgaaagagcctgggttgttccagtggcggaatccataggcatcatgggtcgggtttccaccaaccatggtgatgaaggtgaaaaagaacaaggagaagatcagaatgacctttccaccggacagccaaaattcagcctcgccataggctttgacggccaagacgttaaggcatctttgcgagaatcagtattttgatcagacttgaagtgtgtaaattgccaaaatgggcggaagaggttctcacccgtagaccacgatgacaccagcacagatgcctgcgactggaccaggttcagtaatcttctcactccagaaagacaagacgagcgtgaaagccgagatctcaaagggaatcaaaagggcctcatagaagctaaaagaagtgttagcaaagacagcaggcaaggtttcggcgaagccgaaagtgggacaaacaaaaagttccagccgaccatgaagccaagagcgtcgtcgacccattttccagccaagcgaatgaaaccaccactgacagggaaggcagtggtcatttcagcgagacagttattcaccatggccaaaaatatacattgaacagtaaaggcaataaacaagctgccaggtccaccgtggtaaagaccggagccgatgctcacgaaaagtgcggttccgatggagccaccaatggcgatcagttggatttgacgatttccaagatgtcgttgaagattgtcggcattttcagccatcacgccttcttggacatctcgaggaccgccctcggttttgaggcccagtgtttccatcacagtgccgttcgattctttcttttctcctaggatagccatattgctttcattcctgtctgcggtgttaagtgggtgatggacgatacggggtggagaattcgcaagcgggagaaactggatgggctgaggtcgcttattcgtctagattctggggtaagggttctgcaaatgttggggtggatcggcggaaatccgggggtggatctgctacaggatggtgggatgccgggctgtgttgcaagggtctgggatttgatcgcgttgtgggcagtgattttgtcgctttggatgtagaaggtgcaatggcaaggcaaatgtcggagatatcgagttagggtaggatttccgtccagtacggagtttagcggagaaacgttgaaactttcctcaagaaaaggatatttggagaagtaaaaagaaggatgcagtcagaaagcgtgaaatgtaggcagcgaaagacgtctaataaagaaaatcagggccaaaacgtggaagtaaaagaggaaactcaaaaagatcgaggttttccctcgaggtacgattagccctaacgcaacaaccccatgcaagccatctaagccatacagaagccatcccaagccataccaagccattatgacgcgcttcggggggttactttcgatatctcccggcgctgattggctcggaatacatatcgcccccgcacgggctgccacttaacccggatccggacacgagccggggcgtggatctcccctggccttttatcttggactcgactacctaaacagtcttagatggactcctcggcgggttatgtcccccaactcagctatgtattacgctcggcagggtgtcctagtctcggtgtgcacgtgcccccagctaagactgcattttaacctcccggttgcatccaatgtctcaattgatctgagtttggaattgtctaactacggagttatccgtatattctagtcttggcatccttgcgtgactggcttatcgtgtgctcggtccttctcacctgggcagcttcgtctgttacgtaaccttgccagataatcttggaaccttggaaccgttaaccttccaaggaagtgccaagtaatcatgagcctgcaatacaaccccctggacgtaatgtagttcgatctgagtagtcaatcgacagaacttggtcgcatggtggatacgtgcagatgccaaggcacggttcgaatcaggtttcattggtcaacagttttgcctctcctatctcaattcttcttctcgcactgggcatatcatgccgactttctctttgaggcttggaaaagcgtagaaattgttgggaagataacgcatttcccctcatatcagacaatcaaatcagacaatcgaatcagacaatcgaagtatattgctcattggtctgatatccgtgcatctctctctttcctctttggttcttatgttagagaagaaagacggtgtgcttgctgattttcttgccgagtgagcatctttagtacagattgtgtgcctgtacctgcatctagaattcatacccctgatcaatggatgaggtcgtagagcgagactcgatcttgccctagcctgtcacatagtaagtctcaatcgacaattagttagtcgaacaagttttgactcgtaatgtttaattttccaatcactgtgtagtacaaagcaggtactccctcttatacaaaatgtcatacatcgaagtgtacatcaatgtggttccacgctaatgagacaaacctggggattaatttgcagatcacgtggccgatttccggggttgctttgaaattcccttgccacaagaggcttgacgaccaggaacacgggatcacgtgataccgctccttgtcgactcccgaggtcgggggacagaaaaaagtttgcttagagttgactcaccaatgtctccgtgttcgatgttgttgaagcgcgtcgctaggcctccggccaccatgatgtgcagaccggtgagtacagcttcctctcatgatcacccaattcaatctgactcccaaaggttcggccccggtggactccgtccttcggcgtcccaagcaggacaatccatcatcccctacgatcggtctcgagatccctctcttctcgttcgctgagcacgacagccttcacccaggccgaaggcttccactcacagcaagcgaatgcttcagtgcctttttctgagactcccaccgagagacgcacgccgcaaaccttgacggagaagatcgtacaacggtatgcggtcggtctccccgaaggaaagctcgttcgcagcggcgactacatcagtcttgcccccgggtattgcatgactcacgacaacacctggcccgtcgccctcaagttcatgtctatgggagcaaccaagatcaaccgcccagagcagattgtcatgactctcgaccacgatgtccagaacacgagcgcagcaaaccttaagaaatacgagcagattgagacttttgctggacaacacggtatcgacttctatcctgcgggccggggtattgggcaccagattatggtcgaagaaggatacgcatggccgggtagtatggcggtggcttcggacagccacagtaaccattatggcggagttggctgtcttggaactgctgttgtgcgtaccgacgctgctagtatttgggcaacgtcgcggacatggtggcaaattccccctgttgcgcgggtgacgtttaccggaacgctaccagtaggcgtcacaggtaaggatgtgattgtcgcgttgtgtggactcttcaatagcgacgtgttgaaccatgcaattgagttcaccggctccgaagagactatggaaagcctccttgtggatagccgcctgacgattgccaatatgacaactgagtggggcgcgctcacgggtctcttccccattgatcagactctgaaacgctggctacgttacaaggctaccgaggcagcgatgtctgaggaccgcacaacccggaatcgtatcacgcacgaaagaatcgacgagttgttcgccaaccccctcacagccgaccctgatgcccaatacgccaaacagctctacctcaatctctctactctctcgccttacgtctctggtcctaattcagtgaagatcgcaacaccactcaacgagctcgttcaaaaggacatcaaaatcaaccgcgcatatatcgtctcctgtacgaactcgcgtgcttcggacctcgcggcagccgctaaggtcttcaaagacgccgccaaggccaaccccggcacgactcccaagattgctgacggtgtcaaactctacatcgcggctgcttccgcgcccgaacaagaggccgcagagtccactggcgactggcaggccctcatcgacgccggtgcgcagccgctgcccgccggatgcggaccttgcattggccttggaacaggtctattggagcccggtgaggtgggcattagtgccagtaatcgtaacttcaagggacggatgggctcgagagatgcgctagcatacttggcgagtcctgaagtcgtggctgcgagcgctctcaacggcgttatctctggccccggctcttacaaggtgcctgagaactggtctggcgtggagcacggattcggaaccggatccgaacctaccaccgagaatgagctcaccaatattctacaacagatggaatctctgatcgatcgggttgagtccgccgcagacgagtccaagcctgccacggagattctgccaggcttccccgaacgcatcagcggcgagatcctcttcctcgatgccgacaatctcgacactgatagcatctaccctggtaaattgacataccaagacaatgtctcgaaggatgatatggccgccgcatgcatgcagaattacgatcccacgttcaagggaatcgccaagccaaatgacatcctcgtcgccggcttcaacttcggttgtggatcctccagagaacaggccgcgaccgccattcttgctaagcagattcccctagtcgtggctggcagtttcggcaacatcttctcccgaaacagtatcaacaacgcgctcatgggccttgaagtcccccgacttgtcgagcgcctccgtgccagcttcgttcagccatcctctggcgacgtcgcgggccgccagctgacgcgccggacaggctggactttaacgtgggacgtgaagcgtagcgtcgttgaagttaaggagggtgagacaggagagacctggacagagcaagtcggcgagctcccagcaaatgtacaggaaatcatcgccgaaggtggactcgaggcctgggtcaagggcaaagttgcggagtcaaagtgaggacttattaaccgggccagacgagaacatactgatgtcctcgccttccaggtaaccaccgccatacttttgtctcttgtatgattttgcatatttacattttgtactatttttctatcatcaggtaccatagagaaggcttgtgactgccataacaagtcgtggacaaaaaagtctttttgcatagaattgatgattgatcgttcttcctccttatcgacgcttaaaatgcaatcacataatgagatcagataaatacatctgttatacagccctttttcagacatgagatgtttgaatagatgagtccatcatcctcaccaacctcatcacggcgcgctagccatcttaaaacaagcaaaagcggcaacagccagtgacactgcgctcagaaatgcatctgtcccaggtccgatactactcgagagaaagtcgtcgtttaccgtatagcgcggtattagattgaacgttgttgcaattgccgaccatcctgaaatcgctggaacaaccaacgtatcggccattccaaagaaatactcgaatggaagttttgaagtcgacgatagggcaaacgtcaaagcgagagagtacaactctagaaggcgataccggcgtccagacccaaagcacggcaatgtcaagagaacgaatcgatagcatgcgtgtgcaaatatccacgatttgctgacggcagtgaagacgaacaagttctcgtgaactctgactgtcttccatccaacgcggtgtcctttttggacgatccaaacgaagagggcaacgcaggtgattttgctgcacattccccgaagggtgccgcctgtgggagtcccgaccatcatgccaatgtttgcgtacaccgcaaaattaacataggtcgtaaaggcggacagaaatttcgtctgcaaagaccgatccgcagcgaggaacgataggacagagccgaggccgaggggaagtaaacacatggttttggtcatttcaccgagagtagccgttgtgttaaatatgaggatagtcgcgctgaccccaaggacgacgagcaaaagcaggcccgggtttcgaacagcacacccataagtgagaatgaggatgatggtaagccatacgttgaatgggatatcaatgtacggttcaaacgccgtaagtagttgtgagaaagccatgagatgagctgcgtagttctatctggagctttgactggagcttccccagctgtcgtgcggcccacgcctagctgtgctctcagtatctagaaacagccagttggattttccaaaacgtgggaacaaattgaacccgagaagagtttactcagaaattggctatgtccgaacgagagatggaaaagaccagcataccgcccaccatcgacttcggagaatcgtttttacgcactacagtcccacaaaactttacacacgcctctacctgttcggtggccgagtcgtattccaacttgcaagattatcgtgctgtcttgtggagcatggtttgtatggtaggcggatttgcccgaggctaaaagttttactatgacagctgtttgaactgtttgttggccaaccactgtttgatatattgtttctaacaccctatattctctttggccagatttgacagatggcaaatgatacgatggatgtaggggaaagcaagaccaagaagcatgggcccgaagttgcaagaatggttgaaagaattgttgcggagcgaagcgaagcatgtataaatcaaaaggtcttatgtacgtgtcacgtggccaagttttctcctagctgaaacaatagcattctaatgttccatcacgtgaccaagtaaggtcacgtggcatttggcaaaatatctccaaacctgccatattaacgcggccaattaggaaacgacttgacaatttcatttgcttgaatctcccagaaaaatgactcagaccgatgcatcctgtgcgaagggaatttacgtcgggttttattttcaatgctgataccaattctgagacaccattgaacacccgcagaaagtacattgaagaagacgccgcgatgaaaccccttagcggagatgaactccactgattcatatcgatttcaaagatctttactgggttctcgatatgaagctctcataacctaatttcaagcacgtgcctagagactattgacaggtggtaatgggtgagaatcagaaaacacggtgcaggatctctaatgttggtactgcagaatcaaaagcaacgtatgacaacctctagagaaatccacaccgatgagaagaaagaatatgtatatgttcctggatgatcgatggacgggagagatacaaagtgacaggagtaagagagaaccagagctatgtaggtgctatgtgtgtgcctatctggtctcaaacaataccgaccatactcatcgaagcggcgggttgtagtgactttaacggggagtgtttacacttggacccagaagggcaaatatgtagaccaagggcagtgtgggataatgatggttaattgagactccttcttaagccatctgcggaagactcaaaagttgacgcgttgcgttaatacacaataccttgatatatcatattgctcctatagcaactaccaaaataaagccctacttagatcagatgtttgaacgagaaagtctacattgatataatatttcgagagagcgatggtgtcgttcagagacagacctactcacagcctcctctcacaagtatcacttcacctcctgaggctctcaacataaccatctgaactaaaagtcagaacctctgcattatcatcgaggtcccttctcaactccagcgctttggcgtaaacaagaaaggcttgttcacgcgaaagaaatactaagacaactgaagttccattcaaaagtacaaatgcagattagaaacttcatgtattattttattggaaaatatgtgccctatttagttatgggtgatatggacctgtgtgaagaactcgatccgggtaaaattggattacatagttggatacgtatagagtcattcctgcgattcgcaacatggaccggtctgatgacgacagtaaattatgatttagcattcaaagtctcgcgtgaccatgttcatattactatttgcgttgtggcaaaatcgtgttattcttttctaaatgtattgatctaggcttgtgtatcatgggagtcaattacaaggcaatgaataaggaaagtctaatctagtgttataccctagttgttgcaatgctggcttccagtagatacatgcatgacagcatcatttgcattggaattctctggttttaggtcttgtcgtatgattttaatatcatttccactcacccgtctaagaattggggctaggcccagctggacactagatgataaaacgaagtataaaatacaattcgttggctgattccggctgacgcaatgtgacccattgtttgggtttgacaatacaacgacattgcttttcaatgtttctgagttcggtttataaataacctaacgacgatatcggtcttctattcagatattcatcgttattcattattatcggtcaagctgttttttgactgatttcgcctactataactctagaaacaaacctgtgattcatcgatttcgtgaaacaaagagccttcaccaccgataacgatcatggcaggaactgggaatacgaaagttgtacatgatatcggaaatttggttgttcattttgaacatctaacgcgcagtgatgtcgccttggtcggagggaagaactcctccattggagaaatgataggcacccttggaggtgaaggaatctctgtaccttctggttttgccacgacgtcgctagcatacaggcgctatatcgatgggaacaaaatccgcgatggaataaccaggctgatcaaggactggcaaacgggaaaagcaaatcttgccgaaaccggcttggcaatacgcaatttgatactccgcggctcttggccacccgatgttgaaacagccatccggagagcctatcacgaactctcggccaaattaggaattgagaacccgagcgttgccgtgcgttcaagcgcgacagcagaagacttgccagatgcgagttttgctggacaacaggattcctatctgaacatctcaggtgaagatcgattgttgaatgcctgtcgccgctgctatgcgtctcttttcaacgaccgcgccatcagctatcgccaagccaaagggtttgatcacatgagcgttgccctctcgattggcatacaacaaatggttcgctccgatgccaacgggtcaggggtcatgttctccatcgataccgaaagtggctttgacaagattgtgctcatcaacgcagcgtggggactaggagagaatatagtacaagggactgtcaatcctgacgaataccaagtgttcaaaccacttctgagagatgagaaccttttgccgatcatagagaaaaaatgcggggacaaggcaatgaaaatggtctacggggaagatgtaccgacgcggaatatacctacgtcaaaggcggagcgcgctgcttttgtgcttggcgatcaggaaattcttcagttgagccgctgggcatgcaccattgaaaagcactatggctgtccaatggacatagaatgggcaaaagatggcatcacgggcgaattgttcatcgtccaggcccgcccagaaaccgttcaatcgcgtcgtgacgctggtgtcttcacgactttccaggtaggaaagagaggccgcattcttacgaagggactttcagttggagacgcggcagtatctggccgtctctgtctcattgaaaagtctgaagacattgacaacttcgtcgacggctcgatcatggtgactaaatcgaccgacccggattgggtgcctctaatgaagcgggccacggctatcatcaccgaccatggtggccgtacttcacatgccgccattgtaagtcgcgagctcggcctcccagccgtggtgggcacaggaaatggaacatacgttttacacacaggccaagacgtaactgtttcctgtgccgagggtgacgaaggcttcgtctacgagggtaccagcgaaatttccacccaaacagtggacctagccggcctcccagcagttgatacggatattatgatcaatctcgctaacccagcggcggcttaccgctggtggcgacttccgaccgatggcatcggccttgctcgcatggagtttgtcgtaaccaattatattcgaattcatccgatggcgctcgtccactttgatcagttaaaggacgacaaatccaaggaagaaatcgcgcgattgacagctgggtacagtaacaagcctgaatacttcgtcgacaagttatcgcacggttttgcggccctttgtgccacggtataccccaagccggccattctccgtatgagtgacttcaagacaaacgagtatgctggcctcatcggcggttctcagtttgagccgaaagaggagaacccaatgcttggcttccgcggggcctcacgctactattcaccgctgtacaaagaggggttcgagcttgaatgtcgcgccatcaagaggctgcgcgaggagatgggcttcgcaaatgtcattgttatgatccctttctgccggacaattagcgaggcaaaagaagtactaaaaactatgtccgagaacgggcttaaacgtggtgacaagggtctccaagtatacgtcatgtgcgagataccttccaacgtcatcatggccaatgaattctctgagtacttcgatgggttctcaatcggttcaaacgatctgacacaactgacgctcggtgtcgaccgcgactctggtgagctggcaggcctcttcaatgagcaagacgaggctgtcaagtggatgattgctcgggtaatcatagttgctcgcaaggcgggtcgtaagattggcatttgcgggcaggccccaagcgatcatccggaattcgccaagttcctagtggaagccggtatcaactcgatctcggtcagccctgacagctttgtccaagtgaaaagacaagttcttgagagtgagaggaaacgacttgatttgatagcggacgaacatatcatgctttaatattaaagggatatcttttcggcgagatttttttcaaaacaagtcaaaagttcaaatccattttgtatcctagctttgtacctccttactcctccgtccacacactaagatgtcttcataaaatttttgtttcaaatgagatctcaccttgatgaccatggttgcgacgctttgaattttttttcacgcttattgattctcacggactctcttgagtgtatcgcttagaatctccaccgagtcgcgtatatcagccttctcgttactatttgttgccatttcaacagtccttatgattccgcttcttccaagggccgcgggcaagctgaaacagcaaccccactctggttggaaatggctaataggatagacatctcgtttgtccattaggatcgaagagcagattctggacagggcggagccaattccaaaagatactgttcctttcgcttggataatcctttgggatctgtgtttacactcgttggcaagatctttcgggttgaaagtgttgctgggcagcgctttgtcaatggggaccccgcaaagtgttgccgtcgaccatgcaacaacctctgactccccgtgcactcccaatacctgaagatctattgcatttgcggcgacctagattccaattagccttgccttgaaagaaattgtcgaaccataagaacatactccggctttgtctgctaacattccgcgaagccttactgaatcaagaaaggttcccgagcccagcacctgagaggctggtagtccggaatgctcttgagcgaaggaggtgataaggtcgacggggtgtgccacgatcagtaagattgtgtctgatctgaatggcttcattgcgttggtgatgctctgaataatggcgaccttctggtacatgtgctggatcgtagtttcgcctgctgaataattagaaaaaatcttcttcgtatcgtatctcctacctctgtaagactttgatccggcggtgatgaccacaacatcgcattggcctgcttcatggtgtgtggctgctcggacgcgggttccgctattgcaactgtagcttacatcggagaggtcccgtacctggccgtctctcaagtcgggtttggtatcgaccaagagcagctcaccagcggtggaatttaggattagcgcgtaagcaagagcggcgccaacctggcccacaccgattattgcaatccgagtaatcgcgtttgaatctctagagagcatattgcggacctaagtagagcatacgacccctgtggtgatctgaagattgttaagaggcgcttggattgtgtaagagaagtggaattccgtttcttgcgggatgatactggtttatgtggtaacgccggtaggttggagctttgttccaaaacttgtctatgatatcatcagtttactatccagttcgtagctagcgggcgaacttagattgctaaagattcagaccgagggttaacctcagagtaccaaatttgctaggagtacatcgcttgatggttagctttactataacgggaatgaggaagctataatcgtctagccccgtctgcgtctactaaccacaagaccttaaaatcagaaaatgctatttctctaccatacaaatagtgccttcatccttgcatccaggtgtagcgaaagatcgagtcaaagaaaacatatgagcaggaaatttaatgaaatactcaaaggtataaagtatagatagagtgatgggaacagctgttgagggataatacattgttacgtaggtggaccttaccgatcaccaatcatcgaccaaagatttaggaaactatgtagagttagggaacgaatttcttacgtcataatgtgatgacaaactgtacatggatatctccaatggaatcagttcattgattgaggaaagatgagaacggtcgaaggctcccaaaggtctatatcatcgtgacgcggtatattgcaatgctctgaaaacggtttaaatgctagatagtagagagtgtctaattgattaaatgcgaccaatatttattactagttatagcgtaattatacgaaggagttaggacctagggtgaaaactatagattatgtagcgaaatgccgcataaacccaaaatcaaatttggggattgttaacgcgacacccctgcctgatttttcagtattcaatcttactaatcaagcatcgatttaattttgccggacttaattctggactttggaattttggtttacatagtaaaaaacatgcattttgatgagaagaaaatttcattgcaatagattgttacttaattttgttaagggtttacatacaaattgtacagtggcgttgcatgagtatttgcaccccggtacctctaccattgaccgctctgtgaataccgcctgcctattcctattattataggagccacccgcatagtgcgactggctgggagtgagtacgaagtttttccggcagaaaatagggcccccccccgaagtactagggtgcaaatactcatgaaacatgactgtatgtgttctgggctgcgcagctcggccgggaattacgttaccctaaattaggcggccattgcgtagccaccctttaaccaagtaaacaatcaaccaattaaataattaaataattaaaccgcggtatagccactatgccggcgtaagtacctattgtacatgaggtttgataggaaggcggtaagaaaggcgggcaatggtggcccgaaaagtcaggcaggggtgtcgcgttaacaacccccttaaatttcagacgaaaccgattaagcaaaccaattgatcagacaaatttgcgtatttacgggtagatcagacgaactggtaaggcaatcttctagcttcatgttttttattagaatataaccagactaaataagcgattaaaaaccgcacgatcaagggagctttgtgttctggctcccgcttgcagcacattctagtcggtaaattaacccgacgaaacaaacaccttcatctgcttcttggttgctttcagcaagacagctaaaaaaatcaagattgaaactcgtcaatcagatcctgcacaatctcacatctcgaggtctttgcaatgaccttggggagcggccatgacctatccgaccgttagtacatttgagaatgatcgttctaacggacctcggtgctacgacacccaccaccggtaatattagtgtatacatgtacgcaatttgaataaatgagattaacgttgtgctccggattcaagaccgggatcaagttctcgttgtttgcaacaatgtccaacgcaagggcccgctgttttcaacgggagaatgcgaggaatgcgaggattgtgtggcttagcaactatcaaggagttcagcacggtctgtttataatgctgcagggaggcattttctggacacgtttttttttggagaaagtctttcgcttcaatatcgggttcatactccaaccaactccacaaaatgacacacacgaagtccctgttcctgactttgatgggtgctgctgctctgagtcaggcagctaaagttcattatgatcttgacctcacatggaagaggggcgcaccgaacggagtcgagagggagatgatctttgtcaatgatcgttttccaggcccgccattgattctggatgaaggagatgaagtcacagtgggttgtcctgctttattttcaaagcgcatactgagagaaatagatagacgtgaccaacaatttgcccttcaatacatctgtccatttccacggcattgagtagggcctccggaaattcctcttcgattaccgcacaatactgaaccacaacaggcaaaccaacaccccatgggcggacggagtatcaggactatcgcaatgggccatcaagcccggtgacaaataccgataccattggaaagccacgacctatggtacttactggtaccatgcccacgacaaggacagaataatggatggtctctacggtggaattagaattcggtgagtatgcagcagcatgtatttattatgtctctaacaaggaatcagtccgtctgccgaccgagagtcaccattctcaatgatttctgatgaccctgccgatatccaggcaatgacaaaagccgcccatgatgcccagttggtcgtgatgtctgactgggaccatctttcgtccaatgaatacatggatgcactgaaagaaacaggctatgatatcttgtaaggacccaaatatgatagccaaagaagtaccgcactcacaatcaccagttgctcagatagcattctcatcgatggtgcaggctctgtatactgcaaagaccctgaatatttgacaaacctccaaccaccccaggtcagagcagtcataactgagcctttgacggataaggggtgagtctatactttactaggctgatttgaaagccactaacacttgccagatgcgatcccttcatgccagttctccaaggtaactgggagcaccacccagagctccttcccgagggattgaactccggatgtaagcccagtgagggtccaacgtcctcctttgaagtatcacccaaaaaccgatgggctagtttgaacttcatcagtgcagcaagtctcaaatcgttgatcttctccattgatgagcacccgatgtacatctacgaagtggatggacgctacattgagccccagcttgcgcatcaggtttccatttacagtggagagcgctactctgccatgatcaaactcgacaaggaacccggcagctacacgatccgtgtcgctggtcatgataaccaggtcatctctggctacgctaacctcgcctacaagggcggtgaacataacaagcgcgaatcaacggcatatatcgactacggtggcactaacactacagcctctgtgatcaatctgaacacaacgaacctgccgccatatcctgctatcctacctgcggaggacggcgatgatttccatctcctgacccttggacggatcaactcatcctgggaatggactttggatgggacgaccttcctcccagccaatttgaaccaaatggaaccagtgattctcaaccccaaagcaccgagcctggattctgccctgaagattgagacccggaatggcacctgggtcgatattgtgttccagctcgccatccccgacccaaccaagcttcagccaccccacccgatgcacaagcattccaacaaggcctttttgattggcagtgcaatgggcaagttccagtggggctctatcgcggaagcaaaagcaagcagcccggacagcttcttcaaaacccctgtgtatcgcgatacatttgtgactgcgccaaatggagtggcctggatcgctattcgctaccaagtcgtgaacccaggaccattccttttgcattgtcatatggagacgcacttctcgtcgggtatgggcatggtcttgctggatggtgtcgatgcttggcccgaagttcctcctcactacctatagtgtgttctatgatttttctatcctgtctttgatgtatgcgattttatctttctaattggctccttaataataatcatctgccaacgttcaacctgctactaaaataccactgacgtcattgtttgtttatggaacgggctctcgacctacatatcggtgaatatgagtttaggccaaagacggtagtgggactggcatcatcatcggactcgtagtcatgggtaacgcctaagctccagaaacttggccacgtgacctcatctggtcacctgactatgcatcaaacgggagaaaacttggccacgtgacacgtacttctagtttgcctatacttgcttcgcttcgctccgcaattaaagcagtggaaacttctagggtagggggtgcaattaccgtaatttacggagactcataggaggaacatggataggttgaagtcgagcggaaagatatcttaatctggactattgcatttggagtaggggtaaaactgatttcgaatatcactgtaatccttttgatgactgtaattaggtagcttgtgagctcactaataactggcgtcctaagatgaccgacgttctggttgattctattacaatgtaaactattagcctcttcctcaaagtccgtgcgacaactctctacaaggagacttccacaataggacccttgtagacgtgccgggcgcgcacgacatagtatataattgcgaggaagacgctgcctcctatcgccagaatgctccagttcatcgtctccactgtcgggtccattgtacttggccagaagctgaaaaagatgacgatgctgatgtagatgatcgcatacccgttgatcagggtaccaatgatgccggggcagtggaacggtccccagacaagcttcgcaccgggaacattgacaatatcatcctcgttgtcgttatatcgggagatgtcaccacggatgcggcggtaaaagagcaaaacagaaaccattaagtaagaaaggtatatacccgaaactgccatggacactatgtcctccatagcggtatcggaaccaatgttaatcagggaaagcaacacagcgacggtcactgtcaataggatggcgaaaatgggcaactgtttcgtggaagaaaccttgaatagcagaatgttagtccatacaagacttctgatgatagctaagtgcttacctggctccaccatcgccacccggggactcccctgtctcgagaaaaagaccaaagctgccgagacgccgcagcaagtaggcccatgagagaacagacataaatggtgataacgatagcacacatggccaatgaaccaggcaccgagtttgttgcttccatgaagatgcccatgaagttatacccagtggcgctccccagcttaccaccgaggtcagagtcggtgcagaacatcataacaattatcataccaaagccgaggcagccattgataccgacactaatcataagggcgttgggaataacggtcgaggcatttgcgacctcttcggacatctatttggaggtttattagctagagacgtggaagcataactcccaaagaaacttacatgcacggcggcatcacctccagcgaaggcaaaggcacagctggtcataccaacaaaccaggatagtccttgcgtggcgaagcctcctccattttggaaagatagaaaaacctgctcctttgtgttatgatccgccatatagatgagggggattatgatgccgaagaacccaagaatgtgcacaaccaaaatgatcacctcgatgcggggcagcaagttgccggggagcaagttcacgaccaatgcgagactgagcgaagcccaaacaatcaatgttccttcccagggaagagcattgtagaggttatttcctaggatcgcggcaccctggatcatctttcctgtcaaaaaggcacaggcggcgaaggcactctgccagccgagaacagcaaaccatcctatgggcacaagtgtcagcgataatgaatagtttcggtccgagtatgaggtagaagtttacctgtaataaaacttaggaatttctggtgactgcccggggcaagcatggcagcccagtggtattggcctcctgcggtaggtgccctgtttgacaattaggtccgaatttagccgtaaatcaacgaataatgcaacatacatggaggccaattccgacaagaccatgaaattggcgaaacagccaacccacccgaagatgtaggcatagatcgcaccgccggagccaccgctgatatatgttagaaaatgttgcaaggcagcaggttgttgtcgggtgaacacactttgtcagagggccagtaaaagtactggagaccgatcagcgatgtattcagtgaaaatttacaattgaactggctcacccaagcagaccttcccaagttcccagaatagtacagctgaagccaaggatcgacagaataccgaattttcgctagtcggaagtgtcagtagtatggtcaggtgagttaccttgaagcctgtatttcataccttaaggactggcctctttcccatccgctggagatgcgcattatcacgatccacctgcccctcgcccctgctggtgacggaagtattgctcttcaattcataggccaccatggcttttttgtagaggaatggaatggagacaagtgggaagtgaacagaaagttaaatataagatgcagctgggttgaaagtacaaaaacaggcaaggaaatgtccatcgcccaagtatcggaatgcgggtggacgagtatccgatttgactagatgggtgtacgttacatcgactagaactgaaagtacgtgagtggatgacgctaatgtatgattgttttgatttgattgcgggcgctctgcgctctgcgcttcgccccaaggagggctagggcccatcgtgttctatgtgtcgatcgtgtggatcacacgcgggaatgattccccaggaagcgcagcatacccaattgaatacgccacagtcaatcatgtggggcatatatcggtgattgctacccatagggcaacagtcaattgatgcttgtatgaaactgataagggcagatatgaccatactcggccctaaaaaggtaccttgattttgttgtggtctagtagtaaaatggctgtatcatattccacgggttgacctaatgcgaggggccgggggccagaactcaggggtgaatccttcgagtacagggggttgaacgtgataagtgtgctggatattaccatatcgttttacaataattagtcactgtgagaataaacactgatcagtgtcaaagtagggaaaatgtaatgtagaaatcagagcaaacacatatagaacacatatagaacacaatgcatatatagagatcgatggactggaaacacaagattggaagccctagaggaactataacatctctttgaagatcttcatatgcatagtatattagactgataggtactggaatgggattcgcatcctagtcgcttttttctgggcactatacggagtaccagacgatataataaaaagcacaaggcatgttttctcttcagcatgatgatctctaatactctcatccttcttctttcttcttaagtaatccaccattcttcacatatttcggctcaatggggacacgattcaaaggtgacactaaagatccagcggtcaatgtcactacatgggttctcttagtcataatcatttttagtgtctctgctcgacttggaactaaagttcgactgttcaagagactcagcacggatgacctcttgatcattgcatctctgattgtcggtatcggtcagaatatcgctgtttcactggcagttgggtccggttatggaaagcattccaaagatgtctccagcgccaatatgcaacaggtgatgaaagtacgtatcttccgccaccttgtgatttttcacttctttggaacagattttaatgtgcttgttgccaggatcttttcgctgtctctcttctgtacctcctaagcctcatgttctcgaaactatctctggtcgtgtttatccggagtcttacaccatccgccaaagataaatggctcgcccgaggtgtggaggctatcgtgtatgtctgggcagttgttgctatctttggaactgcattccaatgctctctgccccgcgcctgggacttccagaacggccaatgcattaacctggtaggtagtgtctccttttgtccctattacctcctatcccccgaagccggacaatactaacgcgaaacgacgggtgtccagttaacttggcgctacttcgtcgctatctccaatatcgttaccgacctcttgattgtcgctcaggcaatgatcctaatttctagcgtccaaacgacgctgttgcgacgcctggcttttgcgggtatcttcctgcctcgacttctgtgagcgacccggctctacggagtgctctctcttgaactcgaaactcatctccctccgtcgatagtgtaacgatcgcaacggtcggcgagcttgcctttatcaaaaaaggcactgaatccaacgacccaacgtttcagatgtgtgaaatcactattttcgaagtggccattcagtgtctcagcatcgtgacggcctgttggggacaactgagcccgttcctgtcctggatgcgatctaacgggctcaagctcaatggtgtggaagacccaacctcgtggagctataagatacgctcacaatcccaggggcggtccaagtcgcgagaccgtaagatcaggtctgaaagccacgaacttccccctttgctgatacgacgagatcagattttggtcacacaggattgggagctcgacagccagtcaagtcaggcgcatatagtaactgagttcgacacacaatcctaggctagcaacggtggcaagtgccaagcggttccctaatcaacttagctaatgactataaattcatcatgggcgcgacatgcatagactttggtaatccccaaatcacatggaaattacgtgctggaattaaatcggaaaataatcagaataatgagcacatgccgcgtaatgatggctcccgttatagagacgcgcatactatatgtagtgtgctttttcaccttccaaacgaaccttagggacggatctggttccattcgcaatcgcgatcgagccatcgtatgatgggagatggggctgtcgcgggccaacgcataaaattctatactaccggacccaacgcacggcccgaaaccccgattggggtgttggggccgcaccctgtagaacagtacttttgtgtaggatgcttaaacctcaaaggggttagtggagaaagcgcagggcggagtgctggccaacgcagtagctaggtttctctttcgttcaggcgtgcaggaaacccttgcaactagctgtcttatcggctcgcacctcttccctccccgctcctcgaaccccttgaaacgtatctcaacgtcccgacgaccattatgcgggttttattgtcacttgggggccatattcctttctttgtcaattgtattaaacaggtctactgtcacgatctgcatgatttacctatcatatcacgtaatgctaattagagctggtttgataactattttttttttgctagtttagtagttttagcgagaggttggttgatatatctaccctccgaagtagattcttacgtcttgctcttttcttccccatcacggaatatattattttgaactaagttactctttacaaacttggctcggcacacctaccctagtgcaaacgttttagtcaccgccctttcgctagacatttgaacacatatccagccggatttcaatatggggtcggcaaccaatcctctcgtgctagaactagcgacaccagaagatgtccctgccatcactgagctatggtttgctgcctttacgcagccagtgattgggaaacttttccccaacactcccggtatgcaccaatggcaccgggattggcacttgggggacattcagaagtcccactacagatacctccgagtagtggacacccagtcaagagatgaaaaaggccgaccgcggctagttgcctttgccaaatgggacctagccatgccaaatgagcgaggtcgtcgctttccgcattggcatgaggactcgccttaccaggaatgcgaggatttcattgcagaactggagcaggcgagggagaacgtcatgggcgatgagaaacattactgtatgaatgatatccctttaaggttcacaaaggaagaaatgatcactgacatccgaaaccgaaaaagacctcgatacccttggcactcatcctgattatcaacggcgcggagctggctctatgcttgtcaagtggggctgcgacctggcagataaggatggcgttatggcatacgtggatgccagcaaggagggagcatttctataccagaaacataactttgtggatttcagtccgcctggttcggaagtggcttcgatggctcgccgccatcaggtggttccgagcgatcacacttgacttacgaactctgagtccatgctgcgagatatctcattgaagataaagccataaacacatttgaactcactggttcggattgtagctcatttattgttatgtttctgtctagcaagtatatatatattttatgcctttccccgccttttttgctgtctacctagcaagaacaagataccttaacagaagggctactcacacactatttttcgctagtaacacacatccactagctctcaaccagcttgtgtaaattactgtggtatcctgcctatcacatgacttacgaccgtactatgaaacaggatcaggtgatattacttcacgtgatttcaagttgtggagccgcaaaccttaaatgagcgcatccatgggtgagtcccaagtcccggatagagctgagatcgaaacatttggtataactccggggcttgatgacagcgttatatttgatcacccaatcgtctattatggcagaccatcatctcttgttgaaacctttacataattaggagagaatgttgatatttttgttccaaatataaaatatttctgaagcgtcattttcacttgatttctattctactctgcgctaaactatatgttgaagcggtaaatccacaatgcgtagtctgacaaagcagacaagacaaataataccagccttccaagtaggtcagctggcaagtataggagaccatgggacctgcatttctcaaaacattattctcgttcagtttgtgggtgatgatacttctatgagtgtggtaaaactggaaatacggtcttaaaaacagggcaactacatcatcatcccgattttcttactacaatgtatacaatgttttaggtatctcatactcattacgtgctacgaaagaggttagagccagattgaggtaaaaataggcttttgtactcgtttcaaccctgctttctataaatataagaaaagcccgcatattattgataaaaagaagaatcgtgtcccaatctatagcaagagctgttagcacttccagacaagcccattgcatcaacaaaagaaaaatgcagcaaatataaggaatctctaatatctgtgtatattttcggtaaatggtagatctagattttagtacacgcagagaatctgacctatatcgggttagagtcttgaacctcaggttggagaaaagttattaccgattgaccatatagaagaggaatttcacccgggtgtgacgtgctagatgtgagagtgtatcgattcaaaataaggaataggtagggagaaatagagatagagcaggtgcagaagttggagaaggcctgcttgtatagctggccacttctgtaaacatgtaagcattgaagagaaaaccctggagcggggacaggggcaccgacagccttgcctgcgaaacaggtgcgagagaaaagccgtcactgggagtactagggtgctagagaggagattcaggagaataccatggggtgactactgagaggagaagtgaaaagttgtctgcattgctatctatgcctcgggagtgcttttatagttagttaatgcagtagttagttgggttaagaaacagatggacgaggcaaattaatcccaaatatatgttatattactgagcgaagcgaggaaacctgttattatatatgtctcatcaactagtaaacaagcacatacgaccatagggtgtggaaaacagggcttcccgtccgctcagccgtacttaagcnnnnnnnnnnnnnnnnnnnnnnnnnnnnnnnnnnnnnnnnnnnnnnnnnnnnnnnnnnnnnnnnnnnnnnnnnnnnnnnnnnnnnnnnnnnnnnnnnnnnnnnnnnnnnnnnnnnnnnnnnnnnnnnnnnnnnnnnnnnnnnnnnnnnnnnnnnnnnnnnnnnnnnnnnnnnnnnnnnnnnnnnnnnnnnnnnnnnnnnnnnnnnnnnnnnnnnnnnncgccggtgagttagtagttgggtgggtgaccaccagcgaatcctcactgttgtatgttttttgttcacgcattcttttctattcgttcagaagctccctctttttctgatgttagatatccgcaggtcggagagcatgggaaaatatgtgacaccaggatgagtcgttcacctggtggacctcaatttcaaggacggtcttccgtcatctcccaaactaagttgatttctactagatacgtctctatcctcttcacccaacatggatataacctggtctcaactgggacacagcttccacggtcaacaagaactcaagatgcaagctacggaaaagccgactcaatcaggaattgacttgaccctacctgaagagaaaactcaagatgcagggggtgctgtggccgcagctgcgaatgttgcgttaatcgcaagattgataagacacggcagcttggaactggactttctacggtggtatgtggatgttgtcaccaagctcggggttttgagcttactaaaaaagaaaagatgggattccttacaaattttcatgtcgtggacgacggcagtggctaccgccgaaggatcaatcgagcttcaatatggggattatctcttgatggtcatgacagtccttttgatgtgattgtgatgcctccaggatgcgagaaggttgttccaaagagcagctgataaaaggcaaggctgaacaagtcgatgaaacgtttattcttattggcgaagaggagaaggagaaacttggcgaggtgcctgcctggtctccatgatttctttgcaaactctttcttttgtctgtgaatgctcttgctttggtggtcacgggccgatcacatgccgttacctggtttgtcaggcttcacctagctatttagctaattaactagttctcgatcattgtaaagaatctatccttcttcatctctctctcgccgctacaagagctctgatctaaactggcagttacccccgaggtttaacctctgtatgttttcttcctattcaggaacagtcgttcctgctattctagttcacggctcacgtgcaccttgctacctgtcagagcacttttagattctgtaagcttccccatcagcatcactcgatagattcataaaaaaagagccatctgagatcgtaagtctccctcgcagtctttccagcagtctttccagcagtctttccaccagtccttttgaggggttcgttttgctaacgtctatctaagatgtcttttgcctctactgcccctgtcactgagccctgcgcgtcctccactatccttgcccttcaagaggcaataaccgaagtcctgttggccctttccccacacgaaaccatatggtttttatggcagatgctcggcctatatatatgtctgttgtttgcatggagggttgatcaacttcttgagaatatgattgaccagtatgtctcattttttatggagctctgtgaagtcggatacttacagaatttacagttatatagaatttacagttattgtccacctcggaacgctgtagcacgccgagcactgtgatgtagagttctagagagcaggcagtgtagacggatcatcacccctgaaatgagaaatgagttgcgagatacttctgcactaggagattgtatactatggtgtggtctatgtgatacctatgcttgctagccggccgtcctggatggttggtgttgttgtgtcgctctcgtcttgccctgcttggtcaggctgcccatcgtgcatatccctcttcgttataaagattgatttcttattgaaatttggtagaaaggcaagaactccttgtatttttttaaacccattttattcggattcatcaatccgatagactagcttagaggctcggactttaccttcccgtaatatctgaataccagccaacgcaccggccaagctgcctgacttaatctgatatggatggggttgaatgcggcggccctcgagtaggttctgcgctgtatcccaccatttgatgccgaattcaaggttagcactatcaggggatatctcggtcgttcccatgcgataggcttcccccaggatgtcgtacgccattgagacatgcgagtcaacgtcttctctcgcggatgaaacatctagcagggcgttataggaaccgcccgccgacgaaatggcagcgctgcagatggcagcagattggggcgtcgagattgtatcaaaaacgaattccagggcatcatcagtatcctctcggatctgctctcccaccagtggatcgtggtaatcaaaaactgcgtctgccccaagctcaaacatgaagctgcgattggcttcagagcatgttgtgacaactcgcagtcccgatagttttgccaattggatcgcgagtgtaccggtagcagttgcccctccatagattaggatatttgtgtcgtctgactcgctcgactgattcccggggaaaggcaattccatgctctgataaagattttgaccaacagttgtcaaacccacaccaaaggtagctgctgcctcaaagctcatggactcaggtatcaacatttggagatcgcccttcgcaataatatactgagcaaatgcgccgccattgtggcgaacggcattgctaccgtgtacaaagccagcaactcgatcgccctttttgaaaggctttttgacgagcggccccacggcttctactattccggaatagtcacagcccaccgtggccccggtacagggtacaaaatcaatatgacgccagtccgttggattcaaagcgacttcgtacttgttagttcaactattcatcaagcacgggagcgaagaagggcacaaggagaaaataccggcttttgttttgacgagaatgtaattatccggcagcctagggagtgggacatctaccagcgttgcgcgaccaggttcttggacgacaatggcgctttgggtggtcattctcaacagatgtcgcgatgcgagggaaaatgaggggtgcgagagaggtgggggtatggctctaatttctttagataaattgaccaaatggcattgggggttgcaaaaggggtgtatactattgcactccgtgcgcaattctccgtacgcggcctggaattactccgtagagttgtccatgattccgggcgagattgaactattggagatctcagacaaagtacggtttgccgcgcgataatctatctggctactgcgtgtagcttccaggatcgtcgaaatacggagtattgtaagtgatctgcgtggaggggaggggcaagcaagtgttagtagcttcaataaagtcaattaatccattactattgtcgaatgtgctccgcagcctagaagatctcatcgtgatattgagaccgggtagcgcgggcgatgccagtaaatggtccctcagttaccacagcccaaacatcaccgacgcgagattagactcaatgataatagcccaatggatagccctcgatatagtgcaacaggcaatattgagattctccaaaatacatccatgtcctccgtacggagtgcggagcaagggaatcgcaagtacccggggagtccgaaaagtggaacttgtcgcaaatagggggctgggaaaagaaagtcgttgctccactacgggatgggaatcccctcatgagaaaaatcataagaagaaattctgataggcgatcttcggctacaaacattggcttggtgcagcttagcacagcttagtgtcataatatagtggagcatggaacatttggcaatcgtgaaatacaatgaccgatactggtaatggcttgtcacagtataatttataacgtatgtctggtctatcttaagggatggacgatccagttcgttgatctatggagtagacaatctccacttggcagcattttcgtaatcttggcctcattggcatccgagcagattccaacctgcagaatatcatggaactgggtatagaatcagagctgaacaagcatggagaataagatcccacagcattagccatatctattgttccggacttgtttctagcgtaggaaacataatcttaccaagccaaactccaacggatgtgcagaatacggagtagattgaatgcacgaggtgcatcgtccgtttttctatgagtctccactgcatgttctccgatagccagtaaaatatgcatgaatatacaaatttacgcattaatggcattagcgccgagagccagtttcatggcaatcagaagaatgcaaaacattgagtataataacccacagcatcccttcttattcttgtccacgctcgtcctcgattaattttataccccgaagatgcctagtctaccagcaacgacttctgtacctacagatatggagggaattgcagtcattggaatggggtgtcgcttctctggaggagcgacctccgttgagaacttctggcagatgctatgcgacggacgtactgggcatgggacagttcccacaagccgataccaagcttcggcctggcatcaccctagccatgaacgcaaaggagcggtatgaatacctcaattagatgttagtttactattctaacaggatgaatagatcaatcatgatagtgggtttttcttgcaggaagatccatcacggtttgacgctccttttttctctatcactgccaaagaggcggcgggcatggacccagcacaacgtttgttgctcgaagttgcatacgaaacattcgaaaacagtaagttgagtgattttcacgtttccggaaagaagtcagctaatagggaaaaataggcgggataccgatagacacgcttccaggcagtaacacggcagtgtactctggttcaatgaccaatgactatgagctattgtcaacaagagatatctatgatatgcctcacaactcggctactggtaatggaaggactatgctggcaaatcggttgtcatggttctttgatcttcaaggcccaagtatcatgatggatactgcgtgttcttcaagtttgactgcgatccacctagcagctcaatccttgcggtctggagagtgcggaatggtgagcactgcaatctgatgtctattgatcacacagactaaacatgcttgtgacaggccttggtgactggtgccagtcttatcttgcaccctaattttacacaaagactgtcctacatgcacatgatgagtgcagatggcataagtcattcatttgatgagtctgcaaatggatatggtcggggtgagggcatcggtgctgtgcttttgaagcccctcagcgccgcattagccgatggagataatattcgagccgtcatccgcggcacaggaattaatcaggatggccggactcctgggattacactgcccagtccaacgtcccaagccaacttgattcgttcggtttatgaacgtcatggcatctcaatgagagacacttcctactttgaagcacatggcactggaactcctgtcggggtaagcaaaatagctccattgatggataaaaagccatcgtttgattaactcaatgatgaataggatcccatagagctgtctgctgtcggaatgactttgggccaggcacgaacaccgactgatgagccaatatacgtaggctcagtgaagacaaatttcggtcacaccgaaggagccgcaggagtggctagcttgatcaaagtcgtgctgtgtttagaaaagggcacattggtgccgaacgccgggttccaaaacatcaatcccaagatccggctcgatgattggcgtttacgcctaagcgacaaaacaatgccctggccagaccatcttccgcagcgggctagtatcaactcatttggattcggtggatcaaatgcgcatttgattctcgaaagtgccaaagaagccctgggcaatgctaaagaccaggagccggcccctcatgtggtggtgttttctacatttgaccaagctggtatcgaacggaccggtcaaaattggagcacatttcttcaacgtcaacaaaaagccgagcgggaggcttcactcaaagatttagcccatacgatgttgacacgccgatcgcagttaggcttccgtagcttcgcagttgctaactcacaagaccagctgcagagcatcttggataaaggattgcccaaatttccccgagctagtcgcaaagctcaaacaagacttgcttttgtgttcacgggtcagggtggccaatgggctggaatgggccgggagcttttgaggattcccactttcagggaaagtatagcacgatcacaggaaattctttcgtccctgggatgtccctttgatatggtggaggagataaaggcggaggcaaaagacagtcagataaaccgacctgatcgcagccagcctatcacctgcgcattgcagattgctttggttgatcttctggccagttggtcggtttttcccaacgcagtggttggccactccagcggtgaaattggtatgcaaatctccgttattctcgcttcaaacaagcatccaatgatgaataaaagctgacttatttgcaacacgtagctgctggatatgccgctgggtatctttctcgtgaagacgctatgcgagtcgcatggttccgcggtttcttttcgcagcagattgcccagagtgacagacgaggtggtatgctcgctactggtatttctgcggctgacgcaaagaagtacctcgaggagctgcctgcacgttcagttgtggttgcctgtgtcaatagtcctgccagtacaaccctctcgggtgatgtggaattcattgatcagcttgaagcaagattacaacaggatggtcactttgcccggaagctgcgcattgatacagcttatcattcccctcacatggaagatctagttaaagtggtaggtagtgctatcgattgtatcaagcctgaggatcgatacaatggctcaattcccatgctttcatcggtcacaaaagagcgtgtctatcccgccgaacttggtggatcatactgggtacgcaacatggtcagctcggttgagtttactgccgcagtgtcacaactcgcaaacctgagcgagtctatcaagtctcgccgacggccggttccaataaaatggaccgctttgattgaaatcggtccacacgccgttttaaaaggacctgtcactcaaatcctgcagtctgtcaacgcaaatatggcatcattgccgtactattcgttggtttcacggaaccagcatgctttgcgaacagcattggaagttgctggctcgctttggagcacaggacacacaatagaccttgctgcggtcaacagcagtgtcgataatacaagcccaaaaatgattccagatttgccttcttatccttggaatcaccaaacgtccttctggcacgagccattagagacagcgcagttgagacaacgtcagcatccacgtcatgatattctgggagctgccgtagattttcaaaacgctttagagccaagatggagaaacttcctgcgactctccgagaatccatggatggccgatcatgttgtcgccggatcgattgtgttcccagccgcgggaatgttggtgatggctactgaggcggcgcggcaactagctgatagcccagccaacatcaaaggaatagaattccaagaccttcattttatgcgaggggttgttatcccagacgaggaacgcggcttggaaactcttcttcaggtctcccctcatccagggatgccgggttggtatcagttcggaattttctcacttccctcggggggtgcttggattcaacacgcgaagggtgcattcattgcgcgattcgagaaccgaaccgacgatgagcataattcaaactggcaagcagcgttggaacgcatcaagaatacccaaacagtcgccaaaatggctgacgttggacaagcacgtgaatggttgtctaacacaggaggactcaccgtaggaccggccttccagacagtcactggcgtttctttttgcgattcagagtctcgtctctggctatccggggtcgtcacagacacaaaacaatcaatgcctttcgaaaaggagtcatccagttttatccatcccacaactcttgattgcctcttccagtctgccctgttgtcctgctctgatgcattatccagcaacaaagcaaatattccgatcggagtggacaatatctacatatccaatacgttccaaccccaaccgggggagcagtttgtcgtccacacagagaccaagtggcgagacgggaaatcacaatcccactgtatcgcgtcggaccccacctggtcacaaccctggatcacgtttgaaggtgttcatctcggtcgccttcccttcaactcaaattctctaaagcaagaggaagcatcttcggagagccgatattcgtcgattgtttgggatgaacacttggagtcgccgcttgtcactagccaaatcaatgacggaaacaagaagaaggccgtgcaagccagcagtctccaactaacagactggatcaagagattgtgctataccaacggggatgccagagcactcattactacttcggacacatcctcttggatcgcaagtctacaagagctgattccaagtgccggcaagcggccgtgcctaggaaggatgacagtcgcttcatgtggccacgaaaatcaagtggagggcgtcactcccacagagaacagcctcccgggaactcacctggcatccctcactacattaagcgaacttccatcttcgtcgctcgctcaggataaatatgatttggtcgtgatcgatgagcccaagtgggacgacaaaatcattcaagttatcctatcgtgtctgcccaccattcttgaacacggaggtttagcagcaatacgggtatcaggaaccaatcgagactcggcagcagagaagttgcaacgattggaaggccttgaaattcacagcacgaccaaagatcgcgagtttatcatcgcgcgcagaacaccagtctcgtggactacagactccgaaatctatattttgagtccagccgacaaatctaacacactagctgttttcgagcaccttgggaatatatttgccacccataacgttcgtctggtgcctgttgaattggaacaggtgggtacactagcaggaaagactgtgatttctttgcttgacttggcaagtccctggatatccggctggacggaaaatgatttggaacgtctccaggagttgatccgagttaaatacgttctttgggtgtccccttcctggagccaaggggctgttgagaatattggatctggtgccacaggcggccttttgcgaacacttcgcaatgagcagtggaacaccaccatcccacacctattggtcgatgtggaagatttggaagacaagttcggactagcttgtggcattctccaagtcatgcagctcacgacgcaggagagctcgcgccggccagacttggagtatcgtctggcaaacggtcggctgctagttccacgggtcattgagactccaacagtggatgaggccatgcacactcttatgaatggccccaggcctgtgatgtcagaccttacacttgatccgagacgccttgagttgaagttccaagatgcagacaacgcacgctgggaggaacaacaaccattcgaagagggacttcgcactgaccacattgaaatcatggttgaaatggccacaatcttcgatttacatggggatcaagggaagacaccagagacagctcttccaatgttcgaaattgttggaaaggtaactcttatcggatctggtgtgcacgacttggctgttggcgataaagtgttaaccctaacatcggcgagctcgggactcatgacagcaatgcgggtcttagaaagtgacactatcaggattcctgcaaatatggacccaaaaaatgcgatatcaactcctctagcgtacataaacgcttatcagattctcacccaagttggtcgcctcagttcaagttcctcggtgcttttggtcggctcaatcagtcaaactctccaggccatgatagattatgcccttgccatgaacatgcaagtcatcgtggcaactgattctgcagataccaccgagaaccttcgttctcgctacccagtattagcggatcgaattctcggcgttcacggtagcctagaaacaagtgtgtctaggctaaccaacggatgtggagttgacgccagcatttgcttccttggcggctatgcgggtcggaatgctgctaggtgtcttgtcccaggtggacagtacattaatctatctagcgagatgaagatgagtgctcttccagagagcttcattgacagtggctgcacattctcttcgccgcgactgcagaaaattttctcggagaaacccggcaatcttcatgcttcagtacggcatgtggttgacttcatgaagcagcataggatgttggaccgcgtggagtcctattctatgttccccgtttctgatctccaaggagctttgaaacattgcaaagtggccaatacccgagctatcgtggatcttcgggctcctggaagggtccctattgttctgccactgccaaatcttactggcttgccagcggaaggcacatatatactagcaggtggattaggaaacctcggccttgcgcttgccgataccttggtgcagtccggggcccgccatttggttttccttggaagatctggcggggcacaacctggtcaacagctagcccttgatctccttcgctctcatgggtgccgcatagatgtactgcgctgtgatatcgcccaacaggcagatattgaccacctgtcatacaagattcggagtaagaactggaccgttgcaggcgtgattcagtgtacaacagttctgaaggttatttaccctcatttcgttcgttttcattgacactagctaattccttcgtttattatcaggacgcaatgttcgagaacatgacttttgatgattggacccaatccacacagtccaagatccgcgggacactgaacttgcaccatctattttcggaatttgaaggcttgggtttcttcattgctttgtcttccgtggccagtgtcattggtaatatgggacaggctaactattctgcgggcaatggtttcattgacgctctcatggaatggcgacgcagtcacggtctcccaggtcattctatcaatattggcctcgttccagatgctagtggactcagcgacattgccgaagatcaagagcaacgccgccgccgatacaaacatcttgagggtacagaaatcatgacccatgagctccagaccttgctcagagtgatcattaacagcaagctttctcttccatctcaaataattgctggcatgaccgatcatctgtctcgcagcaatggctccatagcctgggttctcgatcgaaagtttgatcaccggctttgccttgctgccgatgacactgaggactctattcagactagcgccttactcaaggggtgtgactcccttgacaatgcaactgaggttgtccttaacgctctgagtgaatatctagcagatgcaatggctacaactgccgatgctatcgactcagatctaccattgtccgcgttgggaggtatgtcttttgatgatttttccccactgtgacttttgtcttgactaacactggcttctaactagttgattccctgaaagctacagccgttcaaaactgggtctctcgcgaactggggtcagaactatcctccttcgagtttcttggctcacaaccgaccaaggcgttagcgaggaaaattgcttctactagttcgtttgtctcggtgccgagctgaaggactatctgataatccatactcggtatggattagctcagaacaaccttttcttcacccatcatgtttcctgtttcaatctcggtttatcaaatctcatttttgggtagtttcaatagttcagtatatgtgttttttacttacaatacgtcgtttcgcgtacgaaatatacgaaatatatgaaattttccaatttgccaagacctgtagcccgtgccgcaggtgggtcccgtcaacaaactcacatgtcattcaatttatcttcatccttagagcagcctcgcatattttctggcggatagctccgctgtgcagattgcaggaccaatgcagcatgtaatggccggggtgagagtcgccattgcaatatagtgagggggatcaagcacgataaacagcttcatccacgagtggctccactgaagcccatagccttgacacatcgggaactggatcgacacttcgatctggatgatctggttgatcaacaaaaagaccgagttttcgatcccgtggagcgggctggggtgaaaatttctgctgtgcaatctcgcgaagacccctgccctgaacgatgacaaggaacgtggactccgttcggagtacggagtacccgcggacacgttaccctgttaagaaacggttgagctgtgcggtcttccttgctgctgcatggatggtataatatgtgcatgtcacttgggaagtaaggcgataaccccacttgcctatggagtgagtaactgtgtagcttttacaagttccaccgtccattccgattttttaagagttgatttcgctttcgatggtctcgcagatctcaaatctaggttctatgctagctcaagagaaaaacccacctcgattatgtatatacactatggttgtccggacggtatcgggatctaccaagccggcaggtcggcgtctgtccagttacatcggccgagatactccgaattcaatcaaaattcaacacgaccctaaatggaaaggcttcgaagcaactacattgaggggtagtttgtggagcttgggctggaccgtccacgttcccaccgagtctaagcaaggcaagccactatcgatatgctactccgtactttgtactccatacaacatagggcatctccacaccgtggagcctttcatggacccaagcaggtccatcaatatgtactctgcaaggccggaactgtatggagtgggattgcgcgggtgactttcctaggaaggtcggactaaaatttgtaaggcgtcttctagtcttgcacatgaaaaaaaggaataaatggaataaacactctgttgtcgtcttacaatctctctccccccttcctctctctttcatatccccatcctttcatcttcagctatgacggacgctgagaagaacgatctatgcatgccggtacccccggccaaggctattgtcatagatcatgacatggccattaccccagatcctgaaaagtttattggcaattactcttccaatgaggttccatccaatggccccgattctcccaatgtggttgacctggaggctcagcccacagagccccgacgaaagcggtttgcgcacttcagatatgtcatgtttactgtgtatcgccggctcttcactgtggtattttgcgcaaatctcgctgtatttctctacgtgatgatctctgatcggaagcttttggcacttgtgaatgcaacagctgtcaatttggtggcgtgcggtctcgctcgacacccgatgatggtcaacgccatctatagagtggtgtgctcgattcctcgaaaggcacctctatctttgcgccgcagatgcgctaaggcagctcactacggtggtgttcacagtggctgtgggactgcatctctggtgtggtacattggatttgttgccatggtgtcacagatctattggacaaattctcccatcagcacagtaacagatgccagtttctcggccgcaccgatcgccgtcgcctacgtcattcttgccctacttgttgtgatggtagtcgtggcatacccaaccttccgcaggagaatgcatgattacttcgagctcacccaccgattcacctcatggctgatcctggcccttttcgtggccttagtcatgttattcgcccatgacgtgggcaatgcagagcagcaaactcttggctataccctcgtcactcttcctgcattttggctgttaattgcggctgtcttcgccgtggcccatccatggctattattacggagggttccggtaaaggccgagcccctgtcttcgcatgctgtacgactatcttttgacttcaccccgatcaacttcgcaaaaggtgtccaagtctcaaagcatcctctacgcgactggcacagttttgccggatttccagaccccattccaaccggtgaaaagccatttgttaagggccacaggcataagagaagctggtcgatcgtggtgtcaaaagcaggtgattggacggcggataccattcgtgaaccgccaactcatctctggaaacgcggggcactgatgcgtggtgtcggatatggtctgcgtgtcttcgaccgcattatcatagtcaccacggggtccgggataggaccttgccttgggttcctaggcgacgaaaaccggcccttgatcaaggtcatttggcagacacgtaacccggtcaagacttatggccaggatgtcattgatctcgtccataagatgggccctgacccgattatcttcgataccagtcgtgatggccgtgttgacatgctccctatcgtgcgacagcaagtgaaggaattcaaagcggaggcagtgtttgttatcagcaaccccaaaatgactcaagatatcgtttacgagtttgaatcacaagggattccagcctacgggccaattttcgattcatgattcacgaaacacaatatatgttgccttttgattttattctaacccagttatgatatacgtttatgacctacatttcggtatttttcgagctatgagcctttcatccatttgtttatacgagtcaagtctagcaataaaagtatttcatataattatcaaaccctaaggaatctcatgtgatgccatgtcatcacatatttacatgtgcacagggacggagcgcctgattttgcagggtcggtgcgtgaatacgcctgagctctgctttatcttagactgacagaaatcaaaatacctgaattaccatgacaaggtcagttcaaacaatgaagctattcccgccatacaaatttccttatgtacccatttctcggcgttgaagctattcctaccgtgcaaatttccgtatacaacttctcggcgttgaagttattgtataaacttccatatacacccgttttatacggttggggtcggttattaacgcccagcaaatgatttgtatggattgtatggtctgtttacagtacatggtatagagcggtgtcgaaagcgacgaataattcaggcataagacctggaaaatcaggcattagacctttggccgctaactaactatgccccttcgcatacactatcccagtggcaacggatacagacttcactcctagtcctatccaaagcggcattgccactgcttgtcaggactatatatttcaggtgagatacgcccacaaccatggcgtgagccttccgctaacaaatcacagactgatacatgcgacagcattgtgtctgcagaaggctttttgacggaccatcaattcgttaaatggaatcccgtctttgggacgtattgttccggtctcgatagaatgggtcatagtataaattcaaagtagcataggtcgttttgccgatgaagggtctaagccttcgcactttctactcagtaatctgtcttaagatttaggcacaacaaatcaagtcaattcatctctttaaccctagaagcaggtagctctcctatcatatctcttatttcttccctacaaaccaaacgcaaggcatacaggatacaatgattggtcaccccacatagtatctgtaagctcccacctatcttgaccaggctttatttgtttgattctttggaaatagtaatccggaacgcaaagctgcagtcttgtccactctcgaccctttgatagtctgtcaaacggcttaaggaacgtcctcagcctctcgtcgtcaaagaagatctcgccaatttcgctcggtggcattttaagttgtaggcgtagtcgatgtacaccacggaaactctgctcgaacaatccgaagaacgcggcatatgttctcatccaatcatcctcgtctggcccagctttgcatatattaacagcaaacgagatttccatagacgtcataaaagaggcacatcgcggtgccaaaatccttgatatgagaaaaggagtatccatagcattgtccatcacaaagttatttgtcccatagagaacatctaaagcttcttcgtatctgcacgatgataagccattgtcctgatattatgagcatagtgacttacccgatttggcagcatctcaaccactccccgccaattgtcagcctttgcgactcagggtaccaatgtgaacaagggtcatcacaagggtcgttgatgaagtcatcacattccatacagacacgatgccaccagtgccagcgaggtcctcctcgtttcgactgcggccaagatggcaacggctccatccagaaatatcggatgtgcactcgccgaccacccataagctcaatgtataccaacctccttatctcagccggtagacgaaagaaggaacactgctgttgagagctgcgctttcgagcaccaagcttacataagccttgttctggctggatcggcagtttccatcgattgaatatatcgccattgatctcacaggtggaatctgagattcctattgcgtttggggaacaatctctcaatttgaacttggactcttttttcctgcgtttgaaaaatttggtaaaaagttttggtgccatgagggtggagggtggagtctaggagcgtaggagagtcggggtgttgattttatatgtgcttgggtgtgggtgaatgtcaccagtgcgtggtaaaacagaagtactaccgcaaaataggaggggaattaacccacaaagggttgggaccggtgtttttacctcacaaagaatcaaagatccttgcaagcggggaaccgccattccataggccgggatcttcatcttgctctttctcctttagttcacaggcttcctcttctagtcctgatttccaatggcaacgagatagccctcaattgtgacaataagattattgtcggaggcatgtttgggaccagtctgataaccagctcgattttgatggtgtcaaattgcctaaacattatggaaatgccaaacatcgagaccagagtgatactgagacgaaagaaacgaaaacgggcggcggcctcgactcgtcatcgtggaagagctcgtgttcgttttgaagaacaacatgaatacacaaagtgatgaattaggatcggacagaaagaggaccaatgctagatcaaagagatccccaggaagctcaaagaaaagccaatcgaaagatgaaacgacccgtaacctggaagagaaattgcaatggcttaagatgaacatttgctagtagcgctaccgcacctcaggcagaggggcatgttgacatgctactgatcttgagtccggtagggattaggaatactgaacgctgttagtagattggtttggatatacttctcggtgatgctgtactagcatgccatttgtatcacgaacatgtagttcggagaaaccgttgacgagtttcgtgcgacggacaagtttctaccttgtcatcataatagcccgaattgcgctatttccgacggctaagaaaaggttcatattatcaagtgattcctggattcgctctaaccccacccactcacagaagatagaagaagatcatgatctaagcacaggaaaatatcagtgtcttttcgcgagaagaatgataatcgtgccaggcgctaatcgaaactcaagggctataagaattcagtacatatttcgaatgagaggagcgtatgatatcttatttattcccactcgtacgtcaaattagacttcatcctaggtagtatccgagataactggggggaaagacatcactccactcgtcttcacatcttgtaatctaagacccctaaatcttcctcctttttgagggcattttccatcttcgcatttgttcgcccacgcgcttgtcctgattctctgctgtcgtccttgtggtcgttctctttctcctatttcttctttccctctggctcgtttcccgcaattttgttcagaaggagctgacaattttggacgaataggtggtgatgcaatggtgaagatgacagtaatgcaccagcgccacttcggtcgttgcaatgttgtaccctgtcaccctccatcaatccccgatcattttttatagttatttcgcgcttgagtttgacgtaagctaggggaacactagttagctaacttctggtcgctctgtcgcaggaatttgagtctggttcgatttgggattcgagactggcgtcatattgggtcctagccgctaggtactcaggtaatcgttgggttgaacgaggcggcgaggtcagggcgaggtcacatggtcgagtatcttatccattatcatcatgtgatcattggatgacaaatcacacatgaaagtgaattgtcgttctttgaagctacaatgttgaatcatatcatgtggtcgtacagtgtactgcatatgtccatcattgcatatttctattattgaatgtggaccattccactcatatcgcaggtacggcagtctcccaccgccagtgcgccatatcagatgttgcctgtagggtttgtttttaggcacccatgaggctagccagggcttttcccaatcaaaacaagatcattgcgtacgagatttttggcaacgaatgaagtgcttttccaggcattagcggggtacaccaggtgggaggcaaaacccgcccagtgggtgtatataaattggtagatgtgcccttttaaatgtccatgattctacaaataacatgcattcaagtcgactaagaaaacgccatgcagagaggttggagaccatccaggaccttgtcccatctctacctgcagccccattgacatccccgctatttaccgtcttccccgccgagatccgcaatcgcgtttatacgttcgcccttgagtccgaggatgttctcacagacgacagttctcactccctctacaagcaaaatgctttctactaccgacccggttataagcagcccaagcgcatccaaactgccctcctccagacatgtcagcaaatctacgctgaggcgtccctcctcccaccggctgtaaatgagcatactttctggttttatcggtctccgccgcatgtcaatgatgcgtcgtcaccgctaaattactttcgcaagatgaccccaaaacagcgggctcaggtgcagcatctgcacctgttcacccaacagtatttcctagaggacaaccattggtctcagatatgggaggggttgaagataggcgacgacgggcgcagtttgcgaggggagtgccggatcgccccgaagaagatgaccatcacctttcgccacacggactggtggtactgggagaacaatgaccccctgggcatcgatccgttccggcccggaagaacacatgcaaccgatatgggcaaggctgtttccccgcacgacgccgctcgatcatgggggaaccaattcagctctatcccctgccttgaagaattggtgatcgagttcgagaccatcatgcggaagagggaccagctagatgacatcatacaacaagctctcgagtggaaatttcccatggaggctgacaagggcttatatctggtggctgaccccaagtcgaagagcgcatatacttgggctggggcgaaagaggcggagctgaaaagacagagacctgtacgaccggtcgatgctgaggctgagtcagaatctgcccacgaacaggagccggttcctgcagctccggctttggtgccgtatgatcctcagtccgattcaggcacaaatagcgacattaatcttggaaaccatcccccatctgacacagatacggagaagttctatgtcgtcttcttgacttggaggaaacagcgtgtcctggagtgagctactcatcccaacctcagtatcacgagggatctagattttgttcctacaattctgacacagactacgatcccacgaggaatgtaaaattgacacattgttagatggttcatataaattttcatactttcgcttcatatataaggaataacatcctagtgtcgtatatagtaaagtacttctagcttgctgcacgaagtacccaacctttcaaggttagaaggtacaaatgaagaggattgttgctcgcatccccccctgcctgaattttcagtggtgccataaagcaaacatcatgtcccagcagtaataacgacgcgaatttgtatcacagtcgataaaagaaggtaataaagaaatatgtgaaaatacaaagtgtgaaaatagacgacacagctagcacctaagggtaagtaaaggtgacatacaaaatttgacgtatgtagaacacaaggggttctaatatgcgccccagagggtggtctgatgtttgcttcatcagagataatccgggggaggaactggaaggatgaacttcggaaaatcgcgaggagagaaaaggagatttgaaagaatcggagtagaaatgtttgcccgtagtcatctgatggcgcgtttagaaagccaagactggatttcaacagctttatcctaacgaaaggacgtagagtagtagggatggcgcgattattgaaggcaagaaagatgtccttatatatgaactagatagaatagatacgaaaaaatcaatttagcaaacaatcaaatcctggaatggacctgattcaccaactgcgcaacagtgtcgactatctcatccagcaaagacacagcaaagtccgaccacgactcaacagtgacaacttcgatgcacaaagtatcccccttggggaatgcttgcaccttgatttcccgcaacggctcgaaatgcgggtagatggtctgcatacgactactagccgccatgaaagacaaaccctcaacatgctcaacatcctggtgcacgaccgaatcaaaccaatcaaccgtctccggccagtcggtacagtctttgataatttccttgagaccgattccttcgaattgcgcgctctcgagatgttgacgctgtacaaaccgcaaaagatccatggcactccatccatctgcgaacttcacccgcactggcacatactgccatgatggtccaacaaccgcgtcagcgttggggaggtcaatgttgcggccactcaccacctcgccaaaagtgacatcatcaagggagagtcgtcgcgcgaggcacagcgcccaagccgctgtcggtagggttgcgactgtgatttcccgtggtcgcgcggctatattgacatccttggagatggcaaaatgagctgcagacactacagggatatcgggttggattcgtgtcatagacgatccttgaaggagatcacgccagtacggaatgctgactggcagattagtgcgagtcacgtggccgacatacgacgagaatggcagactcttcggcactggtcgtccctcgtacaatgccgatagctgctgcagcaaaattggaagacagatctcatcatactgggcatgagagatgcgcatgatcaggctgctgggcccgtcaacatgccgaacgaagagaaatttcaaaaatggtgatccgaggggaatacgtgactgaacatccacatcgcaaagtttctggctgaacgcctccacgtcactttcaatctcatattcaattatctggcagggaaggtcatctacaaccactcccaatgagacaccctcatgctccacgaacacagttcgaaggatctcattccgggagacaagttcctggcagctttggaacagttgagtgcgatccacctcggtatccatgtagaaaagttcgtatcgcatggaataacgaggcagctggacagttccctggacggcaatttcctggagcgggcgacttggataggcatccacaatcttccactcaggctgagcaagcaacggggtcatcttgttgatgaaggcatccacatcggtcagatcgagtgagctgaatggcgcgtattcccgcgatgtagcaactgatggttgagcctccacggcgtgttcggccatgtcaaagagagatcggtgatcgaagattatggttacagttagctcaaggccatccatacgagcctccgagaccagcttcatagcacgaattgagtcacctcccaaatcgaagaagctgtcatccaaaaggatatcctcacagggaatgtccaagacctggctccagacccgttggagcttttgctgcgtgaccgtcgtgatggctgcacgaccactaaggtttctgtttcggggtttgatttgaccaacttgcgcgtcctttgcgcgaataataatcacagagccgtcactggtgtatttccccagctggtttgtcgtgtacagctttgttggttgcttgaaccaggatggattggcaactgggttgccggaagccagttcatcttcgctttcaacgaggagctcacccaccccaccaggtggaacaagagactcataatcatttggattaacgatccaagttgatgtgacaagtgagtaaagatcccccgcaggaaggcttgccgggccaatcttggcgagacggcattgttctggaacatccgtctcaattgtcgaatcgtatatgtgctggattcgctgagtcggatcctcgaggatctgctgcaccagccgatcaaactgttcgagcgcttgctccatctgccggacatcaatggttttcgagtcgaagctggccatgacaaggaacccttttggatcaacggtgaagacaagcataagggcgtatgaattgaatttcaacgcttcccgggcggcctctgcctcgcttgttggaacaaatgcggtggctggttcttcttccgaagaggatacgctctcctcgaccgttgggtgaattacaatgcctgtgcgcaattcacacgcctctcgagcatcggcgttcaaacgtcgaatgtgctgcagacccatgtgttcgtgaggaatgcgatctaccgtttgatcatgaatctgctgaaggtagcttgatgctcgagccttgcgatcgatacagactcgaaccgggacagtggtgatcattgggccctcgatctcctctactgctgccacgggagctgtgcgaccggtcatagtctctccaaacacgacgtcatcggaggatgtgtaatacgcggctaaaagaccccaagcacctcgaataagggttgcaatgctcgttgtagagctcgacgaagcccgaggcagcttgacgtaatgttccaggagagaatcagcacgcgcttgatacccagtatatggaatgagagggaattgtaacgcggtagcgccctccagttgagttgcccaatatgtctctgtggaggctcgatcagtgtcattaagccatctgatgaagttcttgaacggtgctgggctgccgatactctcaccacgataggcgcgattcactcggtcaactatcaatggcattgaccacccatcataaagggcatggtgaatgctcaggacgatgtagattttgccggtcgcttcatcctccacaatggcgaaacgagcaagctcagttcccagagacatccccttgagtgtatcgctactgagatactccgccaagttggaactactgagccatggagtgttggtccgtacgacgatctgcatcaaaccccggcgtgggacttggacaatccttgttcgtaggatcgcggagtctaccgagacactctcgaaagcagactgtagtcgtgtggcggtttgaacatcctggagctcaatgaccctctgcgcgacataggcatctgtatacttcgcggagagggccatgagggcttcttggagaggtgtgcatggatacacatcagccacctcttcaggatgcaagttgcacagcgaagccacttcaacccgcgcagcgtcggcttcccagtgtgctggaagtagcgaaaatgggggaacctccactggagctttgttctcaacctgtttcattttgagggctagatgctcaagaataggcgattggaaaatatcagtgacttgaatagcaagaagctgctctcgcgcagcagctaccaacttcatggctttcaatgagtcacctccgaggctgaaaaagtggtcattgaccccgatctctgcctcatcaccaaatatcttcaaccataggccgtggagcttgcgctccatctctgtccggggtgttaatttgacaactgtggacaatctaagctctgcaatatgtcgccttgttaggccattgccgagagcacgcagctgcttccggtctgtcttgagcgacactagaagtggcatgtgattgagtggtatatatgcggtggggatcatataccggggcaggtttgaggcgagaacatcgtcaataccagcgatcaacttttggaatgaacttgaaaatgagatgatctcgctgattgtgcccgtcttatcactcttttcctctgccacaaagacaatcaatgtggcatctgctttcttccccccaggaaatatcacttccgctgcgacacttgctccagcagggaagtaatttcggacgtggtgctcgatttcgcccagttccacgcgctggccgcgcagtttcacctgttgatcggcacggccgatgaaaacaacactgcctgaggcatcaggatcatatcttaccaggtcaccggtcttgtagagacgacccttgcgacctggcacatctcccccaccctcaagcaaccatgccgggtcctcgatgaaaacctcggcggttttctctggattattgaggtatccatcaccgaccacggggccttcaacaagcagctctcccacggcgccgatgggcatcaatcggtcgtggttggatggatctaccacccatgttgtgcctccgactccctgtccgatactggtgtacgatcgaccgggagggatgtcgttgttgattgtgcaaccaacagtgcactccgatggtccatatgcgatcacgaccttcgtcttctggccccattcggccgcatcgctagcagagattgactcaccaccaaggccaatgacctccagcgatggcatgatatcaggagccaagacacgtgcaaccgatggtgtcatgtgcgccatgtttacattcaatccgcgaatggcgccactgagatcgttgactcgttggtcttctgagggcacacaaatgcaacctccgttggccaaagtgcacagcatgcagtcaacactgacatcgaatgcatacgaggggaagtcgagcactcgcgagtgctctttgtatcccacagctgcggcgcgaggtactgcaccactagtgtagttggagtgcgaaatgactacacccttaggcttgccagtactaccggaggtgaactggatgtaaagggttgacgacgctgggaccacaggtaggtctaccgagagtgatttcaatttgtcttcgtcgaccagcgggccaacaataacttgctttcctcctgggacaatgcgcgatcctagttccgcctgcaactccgaggtcaagataaactcagcctcaacctcgctggcgatagtgctcagtcgtccctcgggctgactaggatccatgagaaccaatgcaccgccagccttcatcactgcgagcacaccgacaattgtccacatagacttttcaaagcagagtggaacagccttgccaatttgcagtccgagatcaactagatatctggctaggtttgttgagcgctcttctagctgtccataggtcatctctccatcccaagatacgactgcaggacgatcgatttgactttgagctttttcactgattatatcttgaatgcaatgatcgatagttgggggcattagcccgttccacttccataactgtgacagctctcgccgtccaatctgaatggccttagccacgggcttatcgaggtcactggcgatagaaataatgaggtcggcgaagatatcaggtaggacggcttcgacaggctgcgtggctgtcggggaccgcggagtcccgcgaacatacacaacaccatccgagagctttgcttccagggcaaatgtccactaatcaagttaataaccgatcacagctataattttagatctacttactttactctcaagggaggcatttcgacataagagtgtatccgaaaattctccgtcgaatttgccccgcctccgaattgcatccaaggcggttctcagcgagctgtcttccccctcaatcacatcggagatgagacctccttggagactgccctcgcttacccaagaaaagcctccatcttcactgctcactgttccccgaaagagaaggaggatccaagccagcgcgaaaagttcctcgtgtcttatatccggcagcattggtagggccatacagtcggaccagccaacatcctgtggcttcaattctttgctgacccaaggggtcgcactgggctcgatgtattcacccatattcttggaaaatagcaatatcaagaaagtgtctctagggcttctccggggactacgaagcaacgatctgattaaattatctgatgctgatcttcagtaacggacttggcatcctgcgagaaaccccgtgcctgcagaacagggccacaacgggtagaaacaatccgagcaggtgccgaacggtcattgccaatattgcaatggagcccgttagagtggggatacatatgtatctgagcccatgtatggttataacgcaaattactctccatactatactataccataccataccatacactaacgccaagggtccacgctaagcactgccaccctggacccaccttggcactaaaaaccttactgcagagccatggcagtcataattcgaaactttcgatattttctttggtggaagattgtcatcaatatgacgatcatcctcttcaatcttaccattgtcgcaagtttccgcctcgatcaattacgttgattgcgacatcggatatccgtcgattcatcacattggtgatttctgaaccagctttggaaattctcgttttaaccatgtatgggaggctagatcgacttccccctgttgttactagtctgcgccaagtagcaatactgagatacacggatggtcctttgtagcagccaaggtctctggtggacatagacaaggatgatcaattccctacatcgcatgaagaaattccccgagccggaataaaccgaggatgaggtggtcaatgccgacattgtatatctgattacttattccctcgtgcatctcctctgagttagtagcattgtcacgtcatgtctttgagttctctccccctggtgcggctaccggagccatacaagacaacctatgaattgcatgtcgtatccaccgagaaaaacctccgcaagtttcagctactgagatctcctcgcggggatgaaggcataccacccccaaagccattggaccatgcgtcgttgagattcacagatctgtcccagcccgattcttctttcacaccagacgaaggaaacaactcaccctgggctcgcgcacagagaagtccagttacctatatctcatgggaaagctcggaggcaccaacagtgggacagatctggaatttggtctatgctatcgagaccttgcacagcgagttcgagatattccgtgccgtactgtctggcggtgggagtgatatacttgcacacgagctacaggctgtgggcttggccattgcgcaccccgaaccatctgctgcgccagggaagcccatcccagtcaccactagccatctcggacagctggtcttttcccgcagtagcttctggcaaggagctggctcacccttcggtacccgcccagcctgggttgctgacccgggcatttacagctatatgagaaagccgttgagcaactacccttcccgaccccgccaacacacagtcaccactggtttccccgagcgtcgagtacatgcccttcacccggtacggccaccaaagccatcccccggctctcgcatctacagccgctacattccacacttgaacgaatttttctcggtctatgcactagactacacaaacgacgaacatctggggcttttcaataagtggcagaatgaccctcgagtggctcaggggtggaacgagactggtactttggaccaacatcgtgaatacttgcgcaaaatccaggatgatccccatcagatcgctgtgctggccaagttcaacgatactttcttttcctatcatgagatatactggacaaaggtatggtttctattttctccagcaacccgactatggctaatttaaattacaggaggaccatcttggtgcgtattacgatgctggtgactgggacagaggccgccattcgctagtcggtgatgagcgtttccggggcccgcaccgcacgattgcgtggtggtctggattgatgcattacatcttcctggatgatccacgtacggagtttgtgactggagagccaaaatactcgaatctcgcccctctgacctacgaccatgctacgggcatgaacctagccaagctggtcgatctgccacataaacggtcggcgctcatccttggtagcagggaaaaattcttccatgtagcacccctacgatttgacgggtctgatactctcgatcgcaatccattccgctcattgaagttgtgatagtcggaaaatgtgaaataagatgtgattgtattatgcatattatggacttgtgagcaagacttcagacgtataccgaggcagattcgtacgtaagcctttaatccacaattacctaggtagcaatgaagccaagcagatcctcttcacgacagtaaacaaagcgtaatctaatcagattcgggatgtccccgggacccctgggacccgatattttgagtttgacagttgtaattttccccatttaccctaaaaagtaaagttcgcaacagcagccaagcaggtctccggggttaacattccggaatagaacacatatgtattgggatcggcgtatcctaagaaattggcaaaccttcccaagagaagccttcgctcggacgaagggcatacggcattcttggcccagccccgagcccaccccaggcccacccccaagaacctccaagcccaaaacaaaaaaaacaacaaatacatactcttggctcttgccggttttatttactagtcgatctgataaagggttcaatattacgtattgtccgacgtcggcttttcactgtaaattcttggtaatcgagtcattcggcgagtggagtgcatggctttctgccattgcacttactttcgggataaaatagcaaatgatcttcctaatgttctcatctattcacgccgatagatagattttttattatggctgccgaagatgcaccagcgcagaagcgcagcgtatgtcacccctgaatgcttaggtttactcaagctaatatcgtcacagtggagggagaaagctgtcttctttcgcctgtttgtctatggcgagcctagcagatcagatattgccctccttatcctgggccttgtctccgcaattgcctccggaattccttttccgatcatgtcgattgtgttcggtcaattggtggatgagatgaactcgacgacctgcaacgccaacgacaccaatggcgactcataccaagatagtattaacaagaaagtcttgttgattgtctacatcggcattgcctacctctttttgatttatatctatgtgtttagctggaatctgactggtgagcgactggctcagcgcctgcgtgagaaatatttcaaagcccttctccgccaagatgtggccttcttcgacaatctcccagctggagaggcatcctcgagaattactggtgatattaccaccgtgcagcagggaacatctgaaaaggtcggaatcgtgatcaacagtcttgcctttttcgtcaccgcgtacatcgtggctttcatcaaggatcccaagttggctggaatgttggtctccttgactccggcctacttgatcatgtctctgttgggaggatattttgtgcaaaagtactttggtcgcgcactggaaagcatgaccaaggcatcctcggtagcactggaggcattttccaacacaatggttgttcatgctttctcggccaacgcgcggctcgaggaaaagtttatcgagtttttgaacccgtccaggattgctggaattcgcaaatcaattgccgcggccacccaggctggtttgctttactttattgctttctcggccaatgcactcgccttttggcaggggtcaaggcagattgcggactcagtagagtccgatgctggtggcatcaccgtcggggcaacatatactgtgatttttattctagtcgatggtaagcatctctatccgtgaatttggttgaccacttgctgactacttctatctatcagcgtccttgatcctcagcacagtcgcacctttcatccaaagcttcgacgctgcttcggttgccttttcaaaattgaaggctgatatagagcactcatccacaattgatggcacttcgaaggatggagaagtattggcggaggtcaagggccatattgagctgcgcgacgtttcattccgtttcccttctcgtccagataaaccagtccttcagaatctatccctttcctgccctgccggtcaacaaactgccatcgtcggcttgtctgggagtggaaaatccactgttgccgggctagcaacaagattctacgatgcgaccgaaggaaccgttttgttggatgggcatgatgtcaaagacctgaatgtacgtgcattgaggagcaatattagccttgtccagcaagagccttgtcttctcgatcgatcaatttttgagaacattgccatgggcctgatcaattcccctgcacacactcatcttcaaccgattctgactggcactgcgctggttgaaattgctgccgctgcaagggagggacaatctcttgcttccgcctctcttgaacacggtgatcaggcacaagaggtggtaagactggtcgaagatgcttccaaattggctgatgccaacaagttcattgaaaagctccaagaaggttacggtacttcagttggttccagtgggaacctgatcagtggcggacagaagcaacgtatctctttggcccgggccttggtgaaagatccccgaattctcatcctcgatgaagccacagcatctttggactcggcgacagaaatgcgcatacagagagccttggagaccgtggccgtgggccgaactgtcattaccattgcgcatcgtctatctaccatcaggaacgcggacaatatcatcgtcatgagacaaggaaagcttgttgaacaaggcactcatacggagctacaggcagccaatggtgcttacgcagagctgattcgccttcagaatctcaatgttgacaacgctcatgagggaacatccacccgatcggtgtcgcctgtcaatcaaatcacagaaaaggttgaaccctgtctttccgtggccgatgaaatccccgataaagatgagacgatcgatacttctattgcccaagactccaagtccaaagaaaccggcggtgttgtcgactcacacaggtcattttcctcaacagtcagctccctgggctctatgttccgaccgtatgcacttgttctgttccctgccgtgaccggcgccattgtcattggcggcacatactgtgcttcggcagtgatctttggtaatgtcgtgagtaagctgagtggctgtgaggagcctcagaatatccgcgatgctggagagttctatgggcttatgttctttgtcctcgctatcattgaattctttgcaaatttggtcagctggtctctcttcggttggatggcagagaatgtgatctacaaagtgcgagttctttcactgcgatctatcctcgagcaagacctccaatggcacgaatccaatgaccgcaacccatcgttgctactttccttgataaccaaggacagcaatgctcttgcaggcctgactggctccgttgtgtgtacaatgttgtctattctcatcaacctattcgccgctatcattatgtcgcacattatcgcgtggcgaattgcccttgtttgtcttgctgtggtacctttgctcctggccgctggctggatgcgagttacctcactagcacagtttgaagagcgccacttggaggcttttgctcggtcggtgggaattacagtggaggctgtcaactccatcaagaccgtcatgtctctctctgtggaagaagagattatgggaacataccgtcgttcgttggcggcacccatgaaagagataacccgccaaagtgcctgggccaatatttggcttgccatcgggtacggtctcagcaacttcctatacggcctcgcttattggtggggagcgaaaaacatcattgcaggatattattctcagacgcagttcttcattgtccagctagcgctgcttgtcagttcacagctgtggggacagatgtttgccctagcccccgatgtatcgcgagccttccaggccacccgccgattgttaaatctgcttgaccttggaaccacgaagaaactgtcagcccctatccgaacactgcctagcaagcttttgcagtctacgagtgacgtcgagtccacggcagtcacccgcgagaaactcgaagacactcgcaatggcatcagcgtctccttcaaacaggtccgttttgcgtatcccgcacggccagatgcccttgtgcttcatggtttggatctgaatgtcaagccaggtcagtttgccgctttggtcggacctagtggtgctggaaaatccaccatcatttcacttgtcgagcgcctctattcccccgcatcaggcaccattcatgttgatggccgagacgttgcctacggtgacatttccttccgtgactccattgcatatgtaccacaacaaagtattttgttcgaaggaactattcgcttcaaccttgctcttggcgcacgacctggccacgaagttacgcaagaggagttggacgaagcttgtcaattagccaatatttacgacgtcattacgcagcttccggacggatacgatacacactgcgggccaaatggtgatcgcctgtccggaggtcaaaagcagcggctggctattgcacgggcgctgatccgaaagccgaagctgttgctcctagacgagtcgaccagtgctttggacgctgagtctgagcgattgcttcaggatggattggagaaggcaaccaagaacatgacagtgatagcgattgctcatcgtttgtacacgatccgtaaggcggacgtgattttcttgattgaggatgggcgttgtgttgagcaaggcactcacgcccagctggtcgagaggagcgagacctatagggtcaatgccttgaaccagacagtggatggtgaatagaaaaaggtagatagctggggttctcttctagttttgttgatatagatctatattgtttaatctcattctcttatgatagacaatcaatcccctactacatgtgaagataaaagagaaacgtacttgctgtccttgccgtacttcactttcgctccttccccgagctacgtcgagaataagcgagagagcgaccattcgcatagttcacaagaaggacaggtacaagacgacagggcacatagatagctttcctttttcctcactctcttgtacttgtatttagattgaaatgcactcttttcttctgaatctatctggcaggtaacactatatatcgtttcgtgacttttctatcggcttgaatcattactcggtagcttctcccaaacgcatccatttccaacaaactgcttttattagctcaataaatctgggtgggagctcctcaacttactttcatatcctagatcgtcattgaagaacatgttacggacctcgtcgcccgaggacagtcccatggccgggaagtgcccaacggcggtttttccaagggccaaagccatcatcggggctacctcaaccaactccacgaatttgggttctgtattgtaccgctccgctaacatctgctggtggatattgacagctgcgaagtgcgcctggtgcatcgccgctccaccgcgcttaataccagaccaggatgcaatatcaccggcagcgtagtgatatttcttgttggggacatctgcggaaaactgaagaccgggcgtgatttggacatatccttcaggatcgcaggcatccttgggaaggtatgacgatgttggcgtgaaccgtgacacggcattgattacatggtcggcaacgagctctcgaccatctgagagcttgagcgtgtatttcgccggagaagattcgctaccgagaactgtatcctggacgcgtgctcccaaaaccacttcgaccttggactcttttagcatttcaagtgcctttgctttgaaatcatcagggaggtcctcagaggagagtagctgttgccgagagtgaacgagtgtcacctttgcctgaggttggagcatcttgatctcggcggcgatctcaataccgacagcccctgcgacagacaaatcaattagtattactcagatgaaagaagatggcgccacgtaccgcctccgataataaccacgccttccgcagctttctcgatagtctgcacagagtctgcagtttcggcaagatatgcctcccgagtcaaagacttaggcgcactaggccactctcttcgcaagcccgaacacgcaatcatgtagtcgtatttttcttcgacaatcttgtgcccgtcatttgcagtattttgatggatacgcgcaattcgggacttgcagtctatcgagtctactcgtccttggatgtgattgatatcgggggactggagagcggggatatcctcgaactttttccagaatgtgctagcatcagcgttggaagctatggccaagggcagtccgatcagatggtctaaaataattatgtcagtgacgtgctttcagatcccaacacgatacacatacaatatccatcgcgctcatccacaatggttacttgcacaggaatcgtgttccccgggccctggtcattctcatccaggctgaatcggcatttccgtccatgacaaaggtcaacgaggttcagagtcgcggccaaaccggaataagaccctccgacaatgagaaccttgaaggggggctgttcctcgagactaggcatagcggcgatcagtataatgagctttggggtaatagaggagaagtttcggggatgggggaaagaaaagaagtcaaactagccggcaaatcgacccgagcaactgatcggaccaacatgactaggtcaaatgtctcaatacccgaccccggaggaaatacagccccaattacgcatgtatgtaactttaaatttcagtgcaaccttgtcttatcagatccgacttcgggagtcttggcaccaggaaacttataatttgttgaatacagatgcacttgatactactccgtgtacactgctacattcttcgactatttccgattcctcgataaaccatacattcttttctgtattcaatatgggcttcgttgttgtccccgccactcttcccgatatccgggccatctacgatgtctggtttgcggctttcaaaggccaattgatcctagacctcatctatccaggaactgatctcaacgatgaggctttccgcaaggtccacacagaagggactctggaatattggaaaggattgggcatggagcacacttttcaatgcattgacaccgacaccggtaaaatcgccggcatggcaacctggcaagtctactggcgggaaaggaccgctgaagagcgtcagaagccctggattggatggttggagggtgaccaacgagagcgtgccgaagggtttttgggacagctttgggagaagagggagaagtggattggccccaagaggcatgtgtgtgagtggtcaccgatccttatattgaaaaaacattgaaaatgaccctatgctgaccggagatagactgccacaccgttgcagtgcatcccgaataccaaggtaaaggtgtcggggcacggcttatgcaatggggaatgagcgttgcggagcagctgaatgtaccgatttaccttgagtcgacggtggagggagtcccgttgtatcaaaaacttggcttccaaactctctcggaggacatcctattcaagcctgaaattaccagggtcgacaaggaggttcgagcaccactcatggtgaaaatgcccatagctgcgggaaacatgacatttgaggaatgggtggaggacaagagtccctctgtgaaagctacataggtatctacatattcttttagatgttcaatgcacatagatgccacatgccgtattgcatgccaagatcttatttttcgacgccaagagaacctctcatgtggtgagaacactgtagacataccttccttagcctacggtgtgtaaaatgtgtctcggaacctaagtttcccgaatgagcgagaactccgaccagttccggagtaatcagatggtaaaactggccatcccttttccattagtcttggtaaggagcctagaaattactcggaggcccaagcggagacggacagccaaagccaagacttggcgtattcttggttattaaatgtccacgggtgtggaaaccttttatcaatctaattattattgagtcaaaaatgacaacaggggtactcttttgtgcggccgtcattccctgacttcaactgaaatttatcgtatttattcaatagcagtttttacatccatgtgggctagaacattactgtggagataataaagggtctgtacatcttcaagggattaagggattggacctccaaggaacatgttatgaagtcgtaacatacggagtactccgtactataagcgaactccaccaggaccacctcggcaagtgtcgatcagtccctggcgtggcgtggcgtggcgtgcattaacttttactgataccgcgaaatacctgtgataccaagcggacccctgtatcgtacggaaatatcaatgtggggccgctgatcttatctgatcaaggattatcagatggcccacaaacccgtctgtatacccatggacctagactaccaacctgaattcttcagttctctaggcgatcttaataacgtgtcagcagacattaaatcactcatatcagagagtgaatgggctggccgatatcggctggacgcggggatttctgaataattctagtgatatatttatttgagtttgaaaagaagcagcatttccctctttcaggaaagttgactttgccatgcgtctttcttccgcctttgccgccctttgcgggctccaagcgacccttgtcgttgctgagaacaccacttggccctggcgaaccttcaagtccagccctcaccagcctccaagtctccaaatctccaaatccggacctaccagccccggatacctcttctttgaccaatcatggaacgcacatcagtacggtgtgttcataatgtcggacagtaatgagcttgtttggcaaagcccgcccggtgatctacaggatttccgagtacagaagctggatgggaagcctgtcctgacgtacttcaacggccttggagtcccagagccgttcggatggggatacggcattgttcaagtcttggacgagtcctatcgaagtatctataatgtctctgtgacaaacgacaactacaaggccttgggcagcattgacagctcctctttcgtatcatggattgacatccacgagaatacaatgacgtctgatgggacaatgctggtcaccggctacaatgtcacccaggctgatctcagttctgtgggaggccccaagaacggttggatcgctgactcgctcttctacgagatcgacgtcaagaccaatgagatacttttccgttggagtgccctcgaccatatcaatcagattcccttggaacatgtacagccattctaccctgttcgagactggggacacaacagcagctctccctacggctactttcatatcaactcagtggacaagtttcaagatggaacgtacctcatttcttctcgttactactgttcgctgttcaagatcgcgaaggatggatcggtggactggacgctacaggtaaataccgtctccttcaagtgtgttaaattgtggcccatatactaataacatacgatagggtcaaggtggcggcgactttgaactcaagggaatcaaattcagttaccaacacgacgcccgcattcgtgacgagactgaaaatgcactcattcttagcatttttgacaattccaactccgatgtccagaacgggactgatcacaccgaaggcatatttatgagcgtcaatctggccactcgcgaggtctcccctgtccgaactctgcacgatcaacgcgatgagatcttttcgacttctcaaggaaacacacaattactacctgcaaatcacgttgtgatgggctacggatcaaatcctaaaatcaaggagtataatgccaacggttcttgtatcatgactgcccagtttggattcgatggtgtcgtttcaagttaccgagcctatcgctccccctgggtcggcgttcccgcaactccccccgatgtattctcttgtattgagaaaagcagcaacaagaccaatgtttatatgagttggaacggagccactgagcatcaacagtggaaggtttttgggggcgctactcgttcagaactgagtccggtcgcgatggcacgaaagacaggatttgagaccgtggcgagcatcaaaggatatcttggatatgtccgagtggaagctcacggcctggggatccagaaaggcgtttccaaaattgtacccgtgcagagtcagtgttaggtttcgcatatgattgcaatatcttgtaattttagtgataatagacaatgaaaacgtggactataccagtctttctagagtaccattttcagcttttatgagagagcaaacttctacatacttgaatagtgcttactttaggtgtgatcctactcgattacaagctcctaatcatttagagattgtcttgagcgagccaaaatttagaaaatgatgatgtactcttcttcggttctagatggttggtattaatcgcatgacacccaactaattagaaacattactacctaccactgcactaacttcaatctgacccccataaacttcatctgccgacttcacacttctctatcaacagcatatcaacttaaataacgcggcccctgacctgcttaagatcctttatcttgatatctctccacatcccagcacatccccaggcaactaccagcagacaaacactggtcaccagcatatatcgctgcgcatctccataggcgtgagcaatagcattccgagttgagcttccccacggatacgacagctgggccgtgatatcggaataaaccgttgccatattcacatctgctggcaggtatttggtcagcgccttcgggaattgactggtccagatagcagcagacacagttgatccaattgcactgccgatgctaccgaatagatccagcatagcaaggacaacagcaatgtgctggtgatcggaaggcgccatcatagcaagctcgccgcaaataacagtggttccaccagccacggcaacaaagatttgcgtcatgcaaatatacccaatattcgtatcgggctgacggaatttgatcatcagcccaacgcctagtatcataagcgggaaggagaagtaaacggccagccatttgaagcgaccagtccagcggatcaggaagccgacgaggagacaaaagagacaggaaccgactctgtaaatggctgagacataactggcttctgtgacatccagaccccaaacaacctggagcattgatgtgaaataactaccccagaccattgagttgaaaaactcaaagacgaacattaaccctccgaagaagacggttcggtccatcagtaaattgaatgggatgaaggtcactggagcccagaatcgctcgtagacggcgaacaagatgagcaaaaggcctccaaaaacgatcatgcagataatcattgctgaccgccattgatccttttggtaagaccagaggctgaatggaagaaggaacaaggccattcctcctgccagaagaatgattccaatcaagtcgatctctatgcagtatttcttcaatgaagcaaaggtgacatggccatggctggacgcgagcaagcccatcttcttagcctttcgctgattccagaagaacagaagacacagaggtgccaccacaaccggaacgataatagtgaagattccgaatccccatcgccagccagggcctccgaggacactctgggagattggacctccgatccaagtggtgatgacgtatggcgaagttgcaaaagataacatgagggctcgattcttcaatgcagaggtgtctgagatgaaaactgtcaaacaatagctgactccttgggatctagaagttgttgcagttagctaggctgttcgaaagacagatatttcccaaatggttatcataattcataccccacggatgagaaaacctgcgcagctgcgtatgtctcaacgttgttgcatgccgccatcatgatgaatcccacaacccaaatgatcagcatcaaactcataccctgaggtcgaccccacgagtccagaatctttgccaatggaattttactcaagcctccaatgatattggccatgatactcgtggcagccgtcaaagaatggagcctaaaggcactggtcacgtatgggttcagagaacggatgacgacctcctggatggaggtaacaaagtagataaaccatatgcttcacacgtaaaagtcagtgatttgaatgaatataaacattggatcatggagagattctcacatcacatatgccaagatcatatgagacttagtccacacggccgcagtggcctgaacacctttcacaccagcctgagcctcttgatcaagagagtcctggtcggagctgccatgatcctcagcggtatctttcggtgtgtgggctgtctctggcgctttctcggagggatagaggacttcagagcccatctcgcgagcgatctccgtttctttcgatgccatggcgaaagactctacggttcgaatactaaactggctaaaaatcgccgatcagtgggatatatatataccctggcatatcagacatgcattatccgatatcggtaataggaaagaatctgcaccaatgagtgtgttgactcaaggaaagtgtccggtaagtaataatttccattgccactagggagattagttgaggccgagccccttggcgcgcctaagcgtcgagaagatgggtccataaccatccctgtaggcttcctcggcccaataaactatgtcctcgtgctcgagtatttctgatgccactccgggactattcgattagcccatcctagactagtttcttcttacctcttgccctattcagaagacatctccggtcaaaccattctcgagggtggcgcttttcttccttgtcgttgtctatggtcctagtggtattttttgttttgcggtattagaaaaaaataaacttaaattacaaacgcgtatttgagctttacagcattttccgtagtacttttgccctatctctccattaaaccatttcgcgtgttgcgcttcatgtgaatatctctagagtaaacttcttttcttgtcggatgttgatttcctatttgagctggcgttcctttcacatccccgaagctgcagccttggttcagcaactctcaacatatcaatatcaacatatcaatatcaagctgagaagagactcgctagcgtactggaggagtcattgcatgccctgttagaaactcagtccaaggatgctttgagtaacgagcctgagttgtcgaggagtgtgtctaggctaacaatatttcgtttcatgagttgctgattctccacaagtgtctcacttttgctaaagtccctagtattataatgattttgtgttccttttccgtaaaaccggatttcatatcctgtaatgaaatctaccgatacatgcttcccatatacctactccaaacactagaacactagaggcctctagcttccgacgcatcctagttttacgaaaacgagcccaggaacgagggtcgagcaaggcctttatctgtcacctgcacagataaaactcactcaaatttagtggtgtctgtcttgaattccgatactacactccgaggacttccccaagaactactcgcccatgcagtagtgaatattgccattgtgcattgtatattgaagagggttatttggaagtcgtggttttgatttcgacagtaggctttacctgtggctcgattttggaaacaaatccatctgggaattcggtattcttgtaatgcagcttcactttttttcagctgaaggatatggttccagccgaatctatagccaatatctgagaggaaagcccatacgataccagatttcgccgccagcgtagaatcatacgaccgaaagcgtcgaaagcctctcgaatccgatccttttgaaacataaccagcaagacaatcgtaataatctctgccatcagcggggtggagaaagcccaaaaaaagcgtcgaggagctgttcatattacggatatcaatatgttcataccgagatagctagtcacaaacgataacggcataaacaccatagtcacgatagtgaaaacaaggatggcttttccctgagtctttctatcgcacgtctactccgctgcacgtctggttggccccaggtcagaacttgcgtaagtttctcgcctcttatgataggccttcacgatatgtgcgccggtcatgagtcatgaccctcatcagcaggtcctgaaaggcatcaatcaaactctctattagctgacaccccatgctgggtctgagctgcccgtttgcaagcttgtcattcgactcctaattaccatagtatgaggcaaagtacctttttaggtgtagtcgagtagactgatgcttctgaacggtctctaagtctaagtagtaatcggtaaacgttcactgagcgttcactgaacctcatcagttattgcattctataattctcttgcatgatcaacctaatacatacgaccatagggtgtggaaaacagggcttcccgtccgctcagccgtacttaannnnnnnnnnnnnnnnnnnnnnnnnnnnnnnnnnnnnnnnnnnnnnnnnnnnnnnnnnnnnnnnnnnnnnnnnnnnnnnnnnnnnnnnnnnnnnnnnnnnnnnnnnnnnnnnnnnnnnnnnnnnnnnnnnnnnnnnnnnnnnnnnnnnnnnnnnnnnnnnnnnnnnnnnnnnnnnnnnnnnnnnnnnnnnnnnnnnnnnnnnnnnnnnnnnnnnnnnnnnnnnnnnnnnnnnnnnnnnnnnnnnnnnnnnnnnnnnnnnnnnnnnnnnnnnnnnnnnnnnnnnnnnnnnnnnnnnnnnnnnnnnnnnnnnnnnnnnnnnnnnnnnnnnnnnnnnnnnnnnnnnnnnnnnnnnnnnnnnnnnnnnnnnnnnnnnnnnnnnnnnnnnnnnnnnnnnnnnnnnnnnnnnnnnnnnnnnnnnnnnnnnnnnnnnnnnnnnnnnnnnnnnnnnnnnnnnnnnnnnnnnnnnnnnnnnnnnnnnnnnnnnnnnnnnnnnnnnnnnnnnnnnnnnnnnnnnnnnnnnnnnnnnnnnnnnnnnnnnnnnnnnnnnnnnnnnnnnnnnnnnnnnnnnnnnnnnnnnnnnnnnnnnnnnnnnnnnnnnnnnnnnnnnnnnnnnnnnnnnnnnncgccggtgagttagtagttgggtgggtgaccaccagcgaatcctcactgttgtatgttttttgtttttatcgtctttgcagcaaacaataaggctttgaagtcatggaactaaggcataagaggaaaagagtgagattcaaacaccagatgtgcttcgacctaaagtaagcacaaatacccttggcatatgcagacagccccaaatgaggaaattgatccctatcaattcctggttaatgcccaacggcatgcatgggcattttggaggtcttgtttgacgcctcgattcgcgacctagttaccccacataatcctcagttctgctaacagccgtctcatcgagttgctatgctttggtacatcagggaaactcaacttgcacacaattcctgccgtcggcttgtcacggatggagtcacccaactggccaacttcgcacgagagcttcgaacgtcggggtccggtattatcgtggaggaagaccttgctgctatttttgagcgagggcggatttcacctgtgatcgagagtgaattcaagaagaatgtcaacatctagaagtttacactgctatgtcatagatcagagctcgatttggaggagggaatggggccgaaaatactgcgagcattccaggagcgaaagtacctcgcgaccgtacctacattgtcgatgctcggttgtttatattcctctcaaaccctggcgaggatgatttcgaaatccatgactatacgtttcaaggtgaaggttgcggatgccacggcggacccgggtttgatggtgttatgaacaagctggtggcttgtaacagtcagtccacggaattccaatgatctatataccgtgagatagtagaagacgagctacagaagtccaagtccaaaagaccatctatatccttcaaaacctcttggtaggatattctgatgcacgtacactatctacgtaactgaaaagagaggagttatcatcccatatgtatatgtgtaagattgattgctgatgatctagctactgccatacctttcaaataacttcatgtggacaaagacacaaagtgcttctgctctgggatcccggggagacgtctctgcaagatgcgaaaagggatctaccgtaccacgctcctagatatctggtaaggaggctgccaaagagagacctgcctagctgcataggagtacccaacgctcaaatgcatcagatcactcatataaggatccccccaacagggagtgccatgtggcctaagcctacgatgaacttctccagctatctcccaatcaacgaggcccacgatcttgtcactgtcaactatacagtgacacttagaaaagtcgttgtgcatgaagcttatatccagatcggaagaggatctcgcattctaggggttggatacggccattttggcgaatctttgggtcgggcacgacgtaagaccgaatctggtatccatcggtaggcttgacggagtgcagctgtcgaagtatctcccgtgcttgctgtttgaatgagtccctttgggcttgcgaaaggtattgccatgcgatggctaatgaaacgtctgggagtctttcctggacaattattgggccgccattaatctaatgggatttaagtactataggcgcaatcaagcagcgagaacaagtaccttgccagtaaagtaaatatcgggcactctaatatctttcaagacattcttcgcaatagcaatcgcctggatctcattggtgccagcatacgagtagtcgatctctatatgctcggcaccttgcccgtggaggtggctcgacttgacgatgatactaccaagagcgaacacgtcacgaccaccttcgtcagccggatatattctagcagattggtcgcaaagcctggtaaccgaagcccattaatccaatgagtctctggactgatttaagaggccattatctgttctctcgttttcaatcaggtgctccggggaagttagtcaccctctttcgtcggagttgtaatgctcttggtgcttctgggcatgttatttcatctactaggacatgtgctctaaacgtgagtcgacagttatatatatttccgactaatccttgataaatatctcactttcattgcccagaatgaagagatctctttgtagcatctataggtccatcttcatcaatagctggcatgatagtttagtactttaagccatactaacttatttgatcctattatctacatctactatccacatattcgaaatggcatcgaaatgtcctctctgtcgtgaatgagttaagacgagcagtgctccccatctttgcccagtcgagaaaatgccgaacgccgagaaaaagctaccatcgatgttggtggtcaagcaacagcaagacgttgtcgtttttcatgctgtcccgatctgagctgtcagactatgtgagttgatacccgctggaaatgacgttgtgaccctcattaatgcttcaaaatcccagattctcaacagcttggtaatgcaactagaatatgccacgcccgaacagagaaaaatgagagcttgcgagttagcagggagtgaacttatcattttatcattttagccttgtggtgtccttgagccctgttatgtcattagttggaggacgaagacccgtggagtgcctgtctgagcagaactattgtagtctgtaaatagtacataggcaagacagtttcatcacctactaaacttggttgtcgaaataattaattatatcacatagttaattcaagatagtactcatatcactacaagtaaatatattccaatctgtcacggataacccagtggaaggctcaccgccatgccaattaccctgcttcggccgccaaggccagcaggaaaggtgcctggtacgaatcccggggttggcattttcactcgtgcgagtaatccacgacgctggaggccactaagcaatggaaatgacacttgagggaagcaattctgcagagacatttccaccccgggatggcgtcgccagatgacaccgtcctgttacaggcaaattggcaattttgtgggacaactactattttttttgctttttctttatatacatgtattgattgtagttagttatatctaggtctactcagtaataattattgccatgcctcttgaagcttcattctgggagataaattgagaaacaagttaaacacgctaataatagcatggtaaaaatgtacaagaacgtgagaaataaacatgaaaagaaatgataagtgttcataagacaagagaaacaaaatactcaaaccagtccatcaaggtgtccccatatgagtctcgtgcgatgcatgaaccgaagtattctgcgtctgctccaagaccacagcatagaatttgccttcttctgaaatatcacggtagggacctgcagagacaacggccctgaaacaatgccaattagcatatgacttcacattctgatatcagaaaacgcccccaaaaagagtgacaaagaaaatagaaaataaaaacataccatcccttatacttcggctgattgaagatatccgtaaacaccctcagcactcgcaacggcaactccagcacagaaggcatctcaggcccatcgccacaaatgggtaaccccagcttgttgacggggagatagatggtctcggcgacgttctgcggattgcgcgtctcctggaagatgagaaggcggcgcgaggcgtgcgacggcggtccgcctgctggcggtctggcgtttgcgcttgcgctcatgctcatcgcgaaggctttttgagtgtgtagagtacgcaataggtttttgcggaggtctgtgttggattttctttttcttggacttggtgtttggaaggatggattgttcagtttggctgttcctttttttttttttggtgttgtcttttacccgcttggacttttctgctgggtctctggcttcgatgcttagaggaagcgcgtttgctttctggggttattagtacggtctctttgcatgtagttcaccaagggcttcttactatttgtcgacagtggcgtgtagagggcgcgacaggctttgcttatcgtttggcgatcagtgtcccgattaggagatcgcggggcaaaaagggggggatttcagagatagttgtatgtggaagatgaagtaagatggaagttgaatgtcgactgttggttttaagaagaaaaataagcccaacagaagagggggacttaatgggcgatattatgattgttgtacctactgaactaataatctcatacacaacatcattgatcatgacattaattagattattcctatattctagagtctagtctcccgatgacctaggcacaataaaatcaacagctaacagagaaagaaaaagaaaacgctgggtatcatgataatgtggccgaagagaaataagcaaaatcaacaaaagaaagtcaatcccttaaaccagggatgaatcatggtatatggcatcattcactatgcagcgagatgagaagcgatatgatcaaatcaagcatcaagctctccctctagcactctgcgtgcagcatccagacgacgccgcagcacccgcgcagccttttcatcggggtccgcagagctcgtgattgcctgcagatccatacagactttaccaaggctggcgaacagtgcttccagcatctgtgtgtcatcatcgttgatgccaccgacactgggggtgctggatgccgcgcgcacggtggagacgagggacgagacaagagaggtcggggttgcagaaccggccgtggctgaggatgagcggccagtatgcttctgaggggaaaggttgtttgggtccagtgaattggtgtggtgccgtggtccacggggtgtttcggagcggtcattctcagcctcgatctcttggattggacttggctggtagctgtggtgagtatgagattgggaatggctatggctatgtccgtgtcgcagctctgtccagggattagtgtcggaaacgtgaggggaaaagaatcgcgggaacgcaccatggttaaaccgtcggtcccagtacatcacgctgtcaacgtcatcctcgtcatcgggacgctcgccttcgtttgcggtggcgaaggttgccacggtcgagacggacatgttgctgttgttacgggagtgccgctttgtgtatgcgggccgggttgtctccactgatccgttcgagctgttgcttactcggcggagttgctgggtgtagttgcccagtgcactatgcaagatgaaatgctcatagtcgaacgcatcctcgcgcagctcgtggggcgtcgcgtccgtgtgcgacggcacgttagggaagacttccatgtcgctttcgaggtcatcgtcaagcggttcacgtaagatctcatccagagcttcgcggtcaatttcctcattaaaatcaccttcttcggcatcttcgtacatggtctcggcgatagattggtcatcgccatagtcaggctcattgccctgccaattctcggcgtgcttggatgcatttccagcagcgtgctcggcggatctgcgtcgatcttccgccgctatctcattcgagacatcccgagtgttttcagagctggcttcacgtcggggattggagccacgactgctctggccatctctgagctccagcgcattcgcataccagtgatcggcggccgtcaaggggctgggcgttcgcaggctttgcaaactacgccggcgaagattgtcctcctgattcttcaccttcagagaagagattttgatgtgaagccccttcatctgatactggagatcccgcacctgcagttgcgactgcgcgcggctagggggaccaaaggagctgtagactggactgaaaccatccgggctcgatttcgattcctcctccgaggaaatgcccaagccatgtggcgagcccgacgaactgtcttcggtgaaagcaggcgattgcgccccttggccctccttctcctcttgcacatgtatcggaggctgggtagaagaaatcgatgatcggtgcgtcagatacgccctcgtaggtgcatagtggaacgaccgatcatcagtatgaagactggacgaagtgctcgcgcccattgcactgacagagcgcgaaacttgcttgtcatcattcgagaagctcgaatccgacggaacaatcgtctcagactgaccccttgaatgacgattattcgtcgtatcctgcgacgtaataaacgactgccgtcgaagcgaaaagctcttaggatccgtgcgcgaaatcgaccgatatagtacacccacaggctggtgcaaacccatcggctggatatagcccgaattcgagggcgagggcgatgagggcgatgaggtcgtccgcggcgtcgtcgaccgagctcgagtgagattgttctccataagctgtggattcaaaggatgttagtattactccctagacaagcggcaagctgcggcgcgtaagaaaagaaaccaacatacattcaagcgtttcttcgcattctccaaaatcctttccgcctcgctactcagtatcgccgaggaaaactcctccccgggccccttgccctctgcagccgcagacgccaccgcgctactagcaggcacggaagagccccctgcagttccaatgaccgcggtagcttgcgctctcgcgacctcggggtgaacgggagattcgtcgcgtccgttttgcgcctcggacacatccctggaagcggaagcgcgtctgctccccgcactgattgtggaattggagctactccactccctgtttggatcatcctgcccacgtaatagcggtgagctggctagctcttgctcatccgagtcgccgaatccctccaatctggcgggcgagagctcctcgccgatatctgagagacggcgactgacattcacgtcttcgtgtgtccatgcatgacgggaaaaatttttcttctgtcgactggatgccgacatggaggcattgggatccgattggttgcgggagttgaagtacgcgatttggggtggggaaggagtttgggattcgcgttcgacttcgtatggtaggatcatgtccgggtctgttagagtgagtgagggcatgatttcgctctctcaggccctggggcctgggggggttttccgtgcagaattggtagaaagagagagaggaaaagggttgaagtcgcagaatcgtcccgtagacgggttgggtaccgttacagttagtttctccccttagacagtttagcgtgccctgatcattgccttattgggatctgtgaagatattcccaatttcctgtctcatactctccgtccggagtaaaaaataggggattaggcttcgactacccttgcaattgtcaatcgtggtagtttaagtagtattaggtataaaatagttagcgggtgatagatcagatcaatattagactatatacggagtacggaggacaccgcgagaacaataggctttctcgggttataataataaaattacgtagaaaaatgtctatgctttagtctctttctttaattaggattgtctccgactgttcgagccatacggtgtagtcaaagagacatggccttgagatgtgatgtatacctatgcatactccgtataggatgcattattgctgtaaggatatgacacaggcattttctataatttttaattgattgcactatatactcacagtcagctgagtatctccaagggtcctttgctatggttaaaataacaatggaggaacccctgagatcggccagccatatgcccaggtgagtctaagttccacaccggtggagattgtaatttcagggacatctcaacgttcattagaggaaaaaagatataaacgttgagaaaaataagagaaaagagaaaaaaaatgtatgctttttgtatacaacgtaattacacatgccataatcccgtagaaacgcttatatctagatcttcgatagcaacaacttcgcaccactgctactcgggctgggcttcttctttccatccttctccacgactaacgccgaggcctgctccagcgccttcttgttcttcttcagagtcttgagcagctcgctcttcttctcaaagtcctccgactcagccagcgcgacaataacgaaggggttagcccccgtcgcccagtctaggatctcatcctggatctgcgcgtacagcacatcgtggaagttcaacgcaggctccactttctcgatagacttcgaggccgggttgaatcgtccaccctgcacaagagacttgagaagacgtcccgcgtgtgcggtatcgcgggcttcggtgtgcgacttggcggcctcggccacggccgcgagagcggcggtcttgtcgccgtcggcttcgaacagcacctcggagaggaactggcagccgaaggtcgtctcgaggagggtagaggcgcgggcagcgatgaattcgagcagtgttggcgaggcggccttgacgagttcctggcggcgcatggccgggtctttcttcgaggtttccttgcggacctcgcggacttcttcaaggaccgtttggtcggcctcggggagaagccacttgacgcgctcaccggcgaaggggtatagcacagcgatacgtgcggtcaggtcgttgacctggtagcagagttcctcgttgcgggcctcttcggtttcattctggttcaaaagctcggggaagaaggacttggcgctaagttttgtgtcatcaatgacctcgtacgcggcaagaataacctggtgaccgtagacgtcgccagccatggccttgacgatgtcgcggaagaatcgtataagcagcttgcggtctttagcgttggagtatgcaagcataagacacatcaagcgggagccggactgggtgaaagccaagttcttgatcaagtcaccctcttcgtcacccttgatcagctcgataaactcattcgcttcgttgctgccgggttttgtgcagaggaaatattgcaacatagcatcgtgaagcatggtgaaaccagtgctcttcttctgcaccagctggttaatcagctcgcgcaagtagttcatgatcggtccacgcttctcggggtgggcttcgatgatcttcgcgagatcggaagtggtttcattctcatcttggaaaatgacaaactcgggaccgtaccactcgcggaggagtctggccttctgtgccctggtcgcaactgtgcggtagatgtcgtcgagaatccatgagccctcggggtggcggatgagacgtctgacatggccgtagaactctgggatgatcaaatcgcgggtctcgtcgtctccgtggacaatcaactttccaaccaagaacttagcatatcgactttgcgccagctccttgtaagtgcccttcaactcgtgcgcgatcagtttgcgctgctcaaggtttccgtacttgagagcagtctgaatgactcgcaccgagtcgtgcttgaacacgaaatcccgaacgcgggtagtgatgatctcaaacagctccttgacgagcttctttctctgctccaaaggcacatgggacttgcggcgcaattgctcccacaatttcttggagcgggcgacggtatcggcattaggctttgcggccttgcgctccagctgaagtgctttttgcttgaggtgggattcgcgagagtctaagcgcacaataatgattagatgtggcatcgtcaacgaggcataaatgaaacttactgttggggttctttggggcctctttctgcgctctttcctccgcattgagtgttctgcctgacttgggcttctcctcctcctcgctcacatcgggcatctcagcatcgtctgaaagggcatcaatatcttcgtccgagacatcgtcaatgtcgaagtcatcctcgtcttcggattcttccatctgaaccttctttgatggcttcttgtcgctcttgctggatttggggtccttcttggagtctttcttggatgaagagctcgacttcacggacttggacttcgatgcggagccttccttggtcttgctccgcttgccattgcgctcttcgctgccgtcaacagcacgcttcaatccagccattatgaaagatgatttccgtaggctgaagggtatctccgattgaaaaaagtaataaaactggggtctttgcgagcggagactgctcgatgtcctggtggataattttttttggtcgcaggcggaggaagtttttttgccggctgtttgcacagtttgcactgataagatacaaaatagccctgccttttcagcaagttcatacatgtactagtatgtagcaatgttagtattcaaataaccatttatatagattcttacagaaatagatcgaataatacgtgtatatgaaaggacagattgctatggacgttttatgataataaaatgtaggacaatgtctctgaacgaagcacagatgactcgagtcgcaactcgacggcaacagatgtacaaaatgctaataagtgacatgagccactagactctccagggacaagatgatgatccctactgccatcgaccaaatcccgaattatattactcttgaacgagtgtggcttgcatcacccgaaacaaacccgaaacgccgtagagagaatcacaacgcattaaagatatttcatcacttcatataccaccggggggtgcaggttcgaaggaggttgctttcacagatgccagctctgatccgccgccactctggccgcgcttccgcccaggaatgtggaagccgaaggacgaggtagaagacttggacccggatgattgcgcatcattactagagtcaccaaaccgggagaggaagccctttttcttaggtttctcgtcatttaatcctacttcttcaaaggcttcttcctccatgattccagacttggtaaggctgatggactgagtgcccgatggggttaatcgggagaaccgagagtcaagagaagttcgagaggggccagcatcaggatggatgatgggtgagcgggcggaaatatcctagattgaagggttcatgtcagtcgggtttatgcggatcggatcgggtcgcggggcatacaaatgatcggcggtaagagtcaaaggactcgcgagagatggagaacggctcattctcgtcaactagatctcgatggttgatggttttgttggagcccgggtatcggcgccagaaactcggccgctcggggggggaaggctatcacggtaattagcaggtgtatcatacttcccgatcacacacagcctgtaccggaagatagacgccgctgtcgttgaccactagagaccgaagtcagcattgcaagcaagtacacagccacacatagccacaacggggattcgaacataccactcaatttgtactcggtgggctcatcctggctattgcggatcggtatgggcgcaggacgttgatttggagagagatagttctcatccacgggagcgggttcctcattgggttgggactttcgtcctagaaagttacgaaatggaggcatggttgaagaagtcaagtgtggagatttcggtgatttcccctgtgaagggtcccacgttagggtgaaagtgccccccgattctggagcctacgtcatccaagaagtttgtgaaataatgaagaccatcagccaatcagattggaagaaaatataagaaatattacataatcttgtatctgccctgacccagtccctgatttatgtccaacctcggcgcacatgcacaggaactggtactctacataaacagactacttctactcaaggaatggattaaatttgcctcatacattcaagcctaacgaataaagctttagagctacaaagatcagaagaagaaaaacatacccttcaacacctgcaaacacccattgaaaaagatcagaacattccacttccatggatgccttcgatatgttccatcgcagttcgcttcatgaaaatagatccacctgcgaacaaactccataagcaaatcaaacccaagaccggcctcaattcagaagctaatccaggcttggactgatgccatgcatttcgctatcactttcgtaacagtgagtctcaccagcaattgacctatactgataacgcaaaggacgaaaaaaaggtgactcggacattgtttgttgttgattcctttttgtttttttattgtgcttttaatttttgggttgtcagaagctaagtggcattgttgggctccagaagattggcactgtggtggcaatccagagagcgcgagtcggatgggtcgaagacggcgttcttgcgctgttcgatgaagtaggctgtgcagaaaaggaatgttagttaaggaactccaaatatgtgcaaatcatgatacaatgtgatacgacgtacgggtcagttgaatcatatcaaaccagcggacggcgttctcgtcactgccgtcgactgccttcagtataccattgtccgggcggaaggtggccttgggaggaatgtggcgcatgcgcaagagcatctccaggatgtcggcgaagcggtcagactggttgaagtagtagggaggacgcttgtcaaggggccactggatggattgttagtgtgaaatgcatcatggaagaataaacatggaccacttacgcgctgagaaaagttctcgttgtcccatgagcggaacagccagcaggtgcgttccacgcagttcagcaggataatagccacaatgaaagtatcgaaccagccgcacttctggcgctgaaggagtcgacgttccaaatcattgataacaaacttgctcagctgcgaggcacgcttctccatggcggcgcgcaactgactgcagagaagtccatatgattccgggtcagagacctcctcgatgggcagacggccctcgtccgatggctgagaaagagagtgcaacgagttcgggggcagagtagggttgtagtaagtcttccaggtgagttctgtgtcgacgagaatgtgggtcgcgacccacagctccaacacgcgttccagaaggatatcctgtatctatgtcaatgcacgttcccacgttgaatatcagaaaacataccttctttccctggctgagttcagccgcaagcagcaaagtgggcttcatgaaaggcgaggtctctcgctcgtagaagtaagaagcattcttcttaatgtacatctccaacttatttgggatgtcatccgagtccgcgtccaggagatagacttcttgcgaaggaccagagaactggtcatctccgagggcttgcaactgggggtcaagtgcagacactgaactgcggtgaccctgcagtccactgaaagtcatgaaggaattgctctcctcgaagtgagtaacttcaatgcgaccggagtagtgttcaaacttgatttgatttttgatgctgttagtgtcatggtaggcaagggtagagttgagatctaaagtccgagtcagtatatattatatcttcaaaaagaagagaacacaaaaaacatactcgcattgtatagttcaaactcatcggaaagacgggtgcgcaggcacgggtgcttccataggcgggcactctccacgctagcgcaagttgtgcaaggggtatcgccagagcactatcaacacttgtcagtaatattcacttatctcacacccacacaggttccaaaatccatacaggtttcttgagcattcggcaacgaagacatgcacccttcttccgcacgtcttgaacttcacggcgtcgctctgcggtgaaacgcccccgcaccttgggtttcataggcttggttgagttaccaaactcgttcacaaacccttttgcctgggtatttgggttcatcgcaatagggcgggggtaagatgcagcacgctgagtggcagcagtcaacgaggggtcatgctcttgcaggctgtcgaaaagaagctgctcatgtgtggacagttgattccattggcctagcttcatatcagagctaaggttatcactgtcaatcgacattccttgagggaccatctcattggcggaggccgcaatcatcgacagctgtgactggcgcgcattagaggtagaatcaggcgacatggacgcatcaccgaggggcggagacatggatgcagggtgctcgcccgaagtgtgacttggaagggcaggtatactaggagcgttggacgattggggagttcctgcaaattgttagtggtcaaaggcgtgcaacaatgaacgaaagaaaaacataccctcggcatttgctgtaccgtccatcttggggtcagacccttgcgagtgaccttggaatccctccgcttcaagcgcaggatcaacaatcacggtcttgcctccagctgtcacagactgggtgtatccaggtccgcgcttggtcacgtctgaggcgccgacctgtcgcgaggcttcggccaacacgttgagaccgtcgaagttctgtcggttcggaaatccaccttcggcagacttgcttttacctccagcaggggaatctttattcgagtcaccgtcggtcaagtcggggagttcgtggagtcgcaacaacacgcgttggcggtcgcgtaggggaatcgcctgacattttttcaccagatggttggtaaggctgtcaatgcgacccttggggaacacttctccgcaggctttgcacgtatgctggtagcgattgctcgcgtcttccagcttgggacctcggtggaagaactcgaggatgagttggttgggtttgcgacccattgtgagggatggccgtggacgtgtttttggaaggttttcacgtgtcgtttagcggtatagtgacagtgaacagtcggccagagcaatcgacgtgtcgctcgttcagactaggcagtgtatcccgccaagctgataggtctgtggactcggattagaaatggggaatgtgggatgtgggaggaaaatcacacacacagtcacaaggactgcaaggcccaggctgtgaacctcagataggaccagtagcctcagaagagactcgaaatggaatttagaaaaacgaatctcgagatgatcgagtcgatgatgtgcgggcaaaaccagggcagtagagggcggtctgggaatcgcaaggggaggaacacgcgatggaagcttcaccgcacgaaaggcggtgatgtcttcaaggcggtaggagaaaggcggtgatgaaagaagaataaggatatctcgatatcaacttggataggagacgagggaaaggatgagttgttacgggatggggttgaagaagagaagaggtgagaaatggagggagaggatttattagtcactttgtgccactgtgactgccactccctctctctgaatctctctctctccttctgtatggaaactctatatatggggagttatgcaagctgtatcatttctttttctttttttctttttttaaggggttgataatatgtgtctacttgatacctagcaatacaaatgactggcatacatactacgcctacatgttggaaaacagccaatctaagaatatcgtcattcccgtgcctatatttcggtgcttccccccggggccccaaacctcaatttcccccttttgtgtatggccaatactaacaacactcagaactgatactctcatgaacctatggatggaaccttcatgctcatcaacaaatacggtgctcgggaggccgccagggcacacccaacagagcaaagatccgacgttcgttccggccctcaagcagccgacccccattcagtttcacttgctggttccgaagcacatcggtataaaggcccttttggttcaagcacatgcctttcttgcgtgccagcagtctcatactgcggttgaatatatcattccccgtaaagtatatcaacgccgctccgatctccgcatcaggaacgaacaataaatcgatccgacgccacagggtggtgccaggtagggctgatgcaccgtgccatttagatccatcctgatgcgacgagatggcaaggctagcctgcagaaagccactactgaacaatctaggtacaacaagaccgagcatcgtaatgcggatttgctcaagcgaggcaccaggtttggtgatcagacagtccacgtccccgcaggtgagtgccccgcggcggtaagagcccgagacgatcacctgcatatccctatccacagcctgcaccgcctttcgcacgatcgccccgtgggcttcaacctccttgcgggggattcgttgcgcgaagtcgctgtggcgttccaccccaatacgctgctgtttagtcaatggagctctttccaataaatccttcagagacctgtagccctgtgcgacccatttggaggcctggggaaggccagcaccatagacgccgagaaattctttgattatcaggtcttctggggtattattggtgttctcgagacgacgaaggcggttagtcatgacaatttcttcgattttgtcagccaaccgctctccgataccagggatggcccgagcctgtgttcgcgtaacaatcttgtttggttgctttcgcaaagcgctgatggctttgcgataggccataacccgccactggtctgcagtctgggtgtagtattccagcatttgctcaagtacctcaatggttctgctgtttgggacgtcaagcttcgtgtccggatcgaacttctgcatacaggcgaaaccttttgtccagtcggattttcctttgcccttgccttctccggtggatgtttttggtgttttccaacttgactcctcccctgagctcgaggtttcgttatcggaagcaccagcagattcgtcaacgggaaattcgactggatccagaggctggttgtaaagatcagttctgtgaactttcgccgacggggaagtagttttaccaaatgacttgtggccttagcctcgtctattatatcatccagtgcatctcgctcccgacttcctcttttacaagcttcttcggctgcaggttcatggaccggttcagagatcatattattgggcacactttccggtacaatttctggtaagtcttttggcaaggagtttggcgtcggtttcttgactggcgataagcaacgttccggagactggtttttctcccgccgcgatggtttcaatggaagagaatcaggaagtggtggttccacaactggagacttctgcttctcggcagtcgttggagttccgttgggacgaaatcgaaggtgcgaggtatcaagaacggaacgaaactggatacattcggatggatatgattcattgacaagagcgacattcgtctacagcggttaatattaaagtctgggtatctcgtgaatgaacctactggcaaggattcaagtttgaggtagttaaggagatcggtcaataacaagttcttgtccataatcacatgagtgacatcggtagcccaattttgactccatcgtgcaccataatcctgcgctcgttgaatgcgcaatcgtcggaatggagatacatcgttgtttgggaagaagactggtattgagagttcagtgagagtaggctgtgggatatctagactacttacaaaagaccaatcccttgaagatctgctggtcaactgggattatcttagcattattggtctttcttttcttttgaggaggccctgcgctcttgatagcaggcatagttccagctgtccgagggcggttcgtaggggcaggcttagcgacagcgaacggactgcctctcttgctttgaaggtcacacgaagatatagggtccgaatttgctcgaatacgctccgcgaaaggagcgactttgtttggattgggtttgtcgagtcctttgtctgcagaagttagaagattcccccagctatcatcctcttcatcttgatcatctgagtcatccagccgatcaagagccgtaaaaaagctctttttagttggaaataggtccttcatagtaggctagtccggattccaatggaggggcggctgcctacgccaggggtggttcattatataggctagacctcgggggtcactgttaccgcacatccatggatgactcgagagcaatggaagcgtaatggtccgaaaacttccttgggccactcggacccgtggatgcgagacgcgattgactggcgcgaaatgggcgccaagtcacgtggcctaatttagatattcacagagtgacctataacgaggaatatcgaatccgtttggaaatagcccccttgggtagacctaggtggtaccataagttatcattctaaacatgtatttcacgatctattacctcccaataatagaactagcatcgacgactattcccaaattggaaatattatgtcatgtgactcttgatttccatggaagatcaaatgcgcggacaagttcgaaagcaataacctcacaatccaccaccctacacacggcccgttgactgatagaccgtgagccaatatgtggaaatccgccctccccacatttgtggccgacctttccctcctgcagactggccgctgtctaagctgccaattccgcaacccagcaactctctcccagctacggaccaaacccttttctctgcgccaatattccagcaagcccgagaaaccaatcgacacaaaagaccccgctcctgtgaaacgaaacataagaaatgaggcacaccgcctatcgactgccatcgaattcaaacagaaccagtcccaggatggacctcagcctggcgacgcagactttgttcctccaagcctagatcggcccatcggtagcccgcaagcacccttagaaggacagaatacaggtattgacacgcggtccttgcgccagcggcgcgacgacttcaccaactatgaccggcacatcaagcggcgcaaggaattgtacgattttgcctttcccccttctcttcttaacaccccgggatatagcccaaatccggaaatagtagggctgataaacaattgcaactcataggacaaagcaagtcgccaagccgtatttccgcgaatggtccaatctccgcttcgccgagggcaagacctttgtctcgaacccgcggctcttcaaagccgacagagccctttacttcccgaacatgcgcggcgtaactttggcaacgcccaaggacccccaggacaccacgacgcagctgcgcggcagcatctctgttgtaaacttgttctcgagcgtgtgggctgagagccaggttgcgacgtttacagggccagagcagaacccggcacttgtggaggcgatggccagcggaggaaaaatggtgcagaggattgatatcaatctcgaggagaaccggttgaaggcgtttctggtgaagatgttcatgtggcggatgcggcagaaattgcccaagcagcagcattcgcgctacttccttgtgcagaagggtttcgttcaggcactcaaggagaccattggcatgatgaattctaaggtcggctatgtttacctggttgattcggagtgtcgcattcgctgggcggggagtggaccggctgaaaagtctgagttggagggactcaatgctggtgtgcggaagcttattgaggagaagaaggatgttctccgggttcaggatccatctcgcaagtattgattaaggttgtgatgagaaggattacctgaactggagcctttgatgtgatttcattccgctctcggttggatttgtacatacaatagagaaactgtataatagaaagtataaataggcgccttcgagaccctttcacgagaattatcatcgattctgtcgcatcccccatcaagggggactcggaacatgcctaaacccaaacgccttcgagaaatccactcgctagagagcagcaatcgacataagaacaataagacatagggacggcggtgtcactgagctaccgccggagcctcgactccatactttaccggaagaacagcaacatcaaaaagcagaacccaatgaagcatccgaggataatagcatcccgcctcttcttgtttccaatcttgccgatgagatagttcataccggggacactgccagcagctccgacaatacgccgattaatgttggcaatagtctcgctctggacaccgaagttctcattgatggcatacgcctggctcagcacgccgtccatcatactgtggctgttctcgactcggccccgctcttcaagcatgtactcggcctcggcagcggcggggttggatgcgcgataggagctgatgtctgaacggacgttagagagtaggtttgcgcggtcacgcgattcagaaatagctgcggtcagacgttgaagctcgcggcggtggtcttggagtatttcgcggtggcgggagacattgttctgtttaagggcggaggcagtgagggtggcttcggagtcgagtagacgggatagttgggcgataacagcctcgcgctgtacggtcaattagttgtcggtgcttttctctctgttacatgtcggtgaatggacgtactctttcgaggaggtctttcaattgcgattcaagccgcagctcctcctccgtgggtgacggcggaggtttggttatggatgcaaattgtgaataggtgtggaaaaggttctcggtctatcgttgcatcagttaatattcgtatagggctcctgatgaggagatattggtacctgagtttcaagcgaccgtgcttgttgccggagctgtgtccaacctgagctagttgaggatgccatggtaggcaaggaatatgtatagtttggatatgaagtcaccggagagatctgatatgtttaagagtttctttcagaccaactagtcaacgtgcaagggccgaggtgctagttaactagttacctgcttgtctatgtacgtaagtgcccatgacggggtaaagtgcgctaaccaaatacagtaattctctgccccggatcccaggcaccttccgccagaaacttcaggcctcaaattcaggctttagtgccaccgtaatcacgtgcacccgctaaagtcacaaattcgcttagccctagtcccacaaccagtcgcaaattgaccctcggacatcttcaattctcaacgtcgacaacccacacaattcaacgccaccatggtatgtcgtgctgtgctacggctctgatatcaaaatgctgatgaatcgctctttttttgcagtcgtccaaggtcaaggctggtcagctctggggcaagaacaaggatgagctcgccacacagctcgaggagttgaagttggagcttaaccagctccgcgttcagaagatctcttccggcgcttcctccaagactcagagaatgtgcgtattcgacaccccccgatatttcattttttgtgcggatgggatttgaagatctgcgggatgggaacgatcgagaacccgggccagacaacgtgcaagaagattacgccaacattcaaccaagggatcaacgaggaagaggtggattacacgatctggcagaccgcgcacgatactggggccatcgatattcgagatttgatactgacggaaatttttttttctagcggcgaggttcgcaagtcgatcgctcgtgttctcactgtcatcaacgccaaccagcgcgctcagctgcgtctgttctacaagaacaagaagtacctcccgctcgacctccgccccaagctcactcgcgagatccgccgccgtctcaccaagcacgagcgtacccagaccaccgacaagctccgcaagcgtgccatccacttcccccagcggaagtacgctgttaaggtatgatactccgacaatccagcgcaggaacaggcggaatgagggttcatagatgttcatctttgccctcgccaccaaggacctcacccgtcagacgaaccgaagcaaccgagcacaatgctgacgatctatttcctgcaggcttaaacgcagaacttgttcggatatggagttttgtgggaagacgttgctggccttggacataagcaggacgtgacagttggatccgaaagcttatggaggggtcggttttctctttttttttacatccaaaaaatggaatttgattatgtatctaaataggatgcaaatcgactcttgacatgacatgattttagacattctccaagcttccttactcttgctcgcatgtaagaccagtgacgatatctcacggagatgcatagtctcaggactcggtgatatatatttctacaatatacaagttttgtgtggtccgcatttctaatctacatggcttgagtacaaagcaaacataactgtcggattaaagatatcttgctttggtcacaagggaatctaatgcgagacatccaaataccaccccaagtctacctaagattaatataaaaatgtttgaaaaccaatatatcctcacatcctaaaatagctaacccgacattaccctcggtcaaagctagaatgcgagccatagtatccaatctcagcctcgacgttccaagtctaggtaatccggttgccattgccatttgcactcgcagtaccaatccccagaaccccagtatctgtctcaagaacccacatgcccccgcaaagacaagaccgcaacagccccagcttagcaatcatcttgaacgacagaagcgaccggggcagattcgtatcaccagagacttcacagcaacgcgcacaccggcgtttctttaccggcgccacgcgaccatcattccccaacggcaacggcgggcgcagcgggcacttcttgaggatatcgacctcacggtgcctccggtacagcgccgtgcgtcggtcatttccaaaaccaagccagctatagtccccgaggtagatcgccatgcggttgatctcggatttgagcgccgggactgtctgtcggaggagggtggccacggcagtagtgaggactggcgggatgcgcgcattaaccagcaattccttttccgggccgggtctttcggcatcgccgaagccagcgccttggtaggcgtgcttcacggctgagtccactcctgccaggaacttctcatacacgtcgattcgtaccggcgatgattctagtgtttggcagatctctgtgtagtagattcgggagtcgcctagaagagaggcggggtttgcgctagcgaaaccagcgtgcacgccgcggaggccacggcagatgaagcggaggaaggcgcgcgacatgcttgagaggaggattaggagggggagagaggaagagtttttcactgtaaaagggtgagcgaagctggagttggttattaagaggttccttacacttctgtgtgaatgcttctgaatcatcgaatacatcttcgaattcgtcggccatgtcgaagatttcgctcagaagaaaatgagagaagtctagtgtccatttggtgttacccaataccatgcgtagaacgtcttttgtttcaattagcaacggataacgataaaatgggctttctttgaactcacctggatcatgcgattctgtctggcctcccttattatactggaagaaatatgcgaatagaactgaggcatgtctgagttgaaggcttgcccatggcacggccgatgagaggttgcggcgcttgagtctccctttgaagcccagtccggcctgtaagctgagacaacgaggtatgtacggatggctcatgagtttgtcctgttcggctgtaaagttgcaattgactggcagtgcacggtacacctcgctgatgaatgtggtttgagcctctttgggagttgtcagtggatttgatattatcaatacgaaggttttcaaagcactcacctagtgatagctgcccaagagcaaccatgagtatgtcatctgtattataatcaacgccacatcctcgactgaatgccaatgtcaaagccgcaatggccgcggaaagattgtctgcatgcctcggtcagtatttttatttcataaaagtgacctgataggccatctggaagatacatactctcgtcatagagaccctccgtggatccaaatgaatgctccatcgccctcagttgcatatgtccgtcactatccagcgtgacggcaacgcaagcattaggagagaaagcaatgtgaagacctgtccatgtcagttctagccacgccactatcgtttagtttcgtacctgatgtttcgagcgggtactggaacccagcctgggccagacaggtcactgcgcttgaatcgtcaagaccgttcagaacggccattgtccgtgtgtcgtagcaagttattgagctgtcatcatgactgacagccaagactgtcccatgctctactaaatcgaccgagacaatgtacttatcgcaataaacattctccagcctccgcagttccattttgggctgaggataggtcagtatcgattccacgcaacagtcaaatatcgaggaatgcacacctttgcttgagcgttgctcttttttgacgtcacttcgtcaaacttgggatggaggatctgcggggcagattccaaatgccacctgacaatcacactcggtgggccttgctggtctggataatcatgcatggcgtggagaggcttcgataagacagccaggatccaagggttagcagtggaccccgcgaggctatcaaactgtcccggcatgatctctagtcgtgtcaacgagtataccgagttcaaaaacggcaaagactgatcgtgatggtccgggccccggttaacgttcaatatattgttaggcatgtcgactttacagtggatcaaacggaaggtggggatagggaattggccaggcagttttccctgtgccggctcccattgtggcgggttccagctgatgtgcactctataaagacacattttctggcatgcggagtaggtggagagaaggatcccagttgttttgatgtgtcagtgatggcaggaaatggagctccgactgaaagacaataccttgtgttgcggtcatggatgcatgcgttaatagtctatccgagtaccctgtgttcttcagttcggctggcagctcggcccatttgctgtcggggttttgatatatcagcttgatctggccggctctggtcacacatatcagtgcgcctttgttggctgggtggaatggcccgacggggcgtcgacggaaaggcgaatatgcccatcggccattcaccttggctgcttgatgaaatgcatgcacctatattaccagttagagtcctttcactcttatcttgatatatcgatggataatacaaggggactcaacgtacataacgctgggagttcagccacatcatcccaacaacctggctgccatcatcgccggagtcaaatgaggcttgacgcaagcctgtgatgctgttcagtgcaattgaaatggaatagattgatacccgaccggaacagtcgacaacggccagttctgagcctgtttcattccatgatagatgggccagttgagtgccattatgggcctccaagactggagccaaagatgactcttccccgagcacccatttgccatctgatgggcggcattggagatagcggataataacccggattccgtctggggaaatagatgcaatacatcccatccgagaccaggcgattttcctagcagatggttagtgctggaatttggatgtgcaacatttttccaagcttactggcagcaccctgatagacgcatttcatctaagcattgtgctagacctttgattggggaggcggtcggcaagcccagctccagggagttgggttctccaaagagatcatccacatcgataccgtcctccatgatcaagggcatgatattatcggaccacttgtcaaatgtgtttgatgatcagggaatcaatagagcagcatagcttcatagagttcctcgcaccaatgaatatcagagatgggctttattattatttggtcaaagggggagtggattcccgagatcggcacccaatgttcgagaagatatcccaaacaccaacaaagatgtcaccgtcaatgcagcaattcccgatgtcaatatgagggggaccatagaccaaatccagatgttcctatgccgtcagcgcctggacctccagggaccaacccagtgatctgcttagtcagacctcgtgacacggatcaggtgacgggtagccctgccaacgaccgctgaccaatcagggggaatataaggtgacccactatttagcagagcgaatcactgccggtcccttgaactgtcaaaacatggaaaacagaaaaagagtggcaggaaaaatagaaagaaaatagccaaaaataagagaataatcggagaagcacaatcggaagtatcaagcgccggattagggcgtgaaagcgcaattgactactataaaccccctacaaagtacgatcaacggggcttcaatggcatcggggcatcaaagactctctcgcgctggactacggagtaattccctctggatttccgaagtatacagcgtagcaaccttgaagtcttaaacccacagccgttcgcatcaaaataacgtcgagtcccgcccttcccggttcggttcgctcaaatcaatttgctcctcagctcaacattcctaaatccattcggccaaaacaaagactgtttttttatctgtggcccgctcttttttctattctgtttttctccggcccatagagccctgaagcgcacgagtttcattaatgttcccccccccctaacgctgacctcatcgtcaacttccttcagagctacaactttcgacctacaactattcctactcttttctaccctctcttctatctatctcgaggtcttacgcgtcattgattcttgattgatctttattccgcatacattcatgattcctcttttcgaggttttctacggtctgtgagcaatttggaggtaccactcggtccttttcgccccgattccccctgggggtgaacattctcctacgccgtgacacctttcaacccattcgcaactcccacgcagccatgggggatctcaatttggatttctcatccgattcggagttgagctccgtgccgtcatcaccaacattagcagcgcagtcatcacccgagccagcagagcggtacccaacgccttcatcccaagtgggagctgagtctgctgagggttctgcgcgccaagcccgtcccgcaaagaggagacgaaaccccctaccaaaggaacgaactactcaatatctcgatctatctgaacctctctatgaacaaaatgcccaacactatttgctagttcaaactctgcgtcatcaaaaagacattgtcgtcatcgctggcgctggaatttccacggccgcgggtagtaagtttctgctctaaggattctgccatgtttgagccgacactcataactctgatagttccggacttccgctccacagatgggctcttcaaatcattgcagaaaaagcacaatctaaaagcttccggcaagcttcttttcgatgctgccgtctaccaggatgacgcattgacggcgcccttccacgaaatggtccggtcgctgtcggcggaggttgctaatattaagcccaccgccttccaccaaatgcttgcccgattaggtatcgagtctcgcctgaagcgactttacacccaaaatatcgatgggattgaaacctctatgcagccactggcgactgaggtcccacttaacgtcaagggcagttggccagtcactattcaactgcacggcagtattgagaagatggtatgccagaagtgttgctacctcgacaacttcaaccccgacatgttcatgaaagccgacccgcccgcttgcacagaatgtattgagaccgacgaagcccgccaaatcggcggtcaccgaagccacggaattggccgcatgcgcccgcgcatcgtgctctacaatgagcacaatcctgacgaagaggcaatcacctccgtgatgaacgccgatatcaagtcccgtcctcgtgtcctaattgtcgccgggaccagcttgaagattcccggagtccgtcgactcgtcaagagcttgtgcacgatgatccgcagtcgcaaggatggtgtcacgatgttcatcaacaacgaaccaccaagcggcaaagaattcgataactgctttgacttgatcgtcaaggggtcatgtgatgaagttgcacatgaagttaacctcaagtcatgggagtcagaggacactaccccatacgtgtacgaatccacgcccgagcccattcttcgtccctcaaattccacgggcatttctgtcgtagtcacaccgaaaaagagacctcgtgcagacactggtctcgccacgccttcttccagccacgacgagaagcccacgaaaaagccagtcaccaaagcttcgaaaatcaagatccaaaacccagcaagcagtggccggtccatcaaagatattatcaagaaagaaaagcctgctgctcgcaagcctacctccaagttcatcaccaagcccgcccccaatcctcgacccaaaaaggccgcaacagccgccgcctcgaaaaagagtgccatacccgccgttccggtcaagaaaatcgcctcgttcggccgtgttaccaaaacctctcaatatgctggcaagctcgttgcaaaggccgacggcaaacctatgcaaccggtctcagcgggcgcctcgaggaacaacggtcctctgccaacaacagagcagcccgagaaggcagacatgctcgatacagagtctcttcctcggccagtggcttcctcttgactattctatgttctagatcctgtactgatcttctattctatgttggctgcaagttcatgacatgatgcatggttaccgaatggcgtccttggtgttatttcccttcattgtctttccggtgccttccccttatccccttctgggatttccgtttcttcacttatgtttacatacttctcttcgtggactgtattcctacttgcatcacctgcgtttgctttaggttgatgattgctgctgtcctcttttcgaaagataccaattgatagaccacggtttctcgcatgggttggctcgggcgtttttgggacgaagctggcttgttccagcgtgatggggtttccttgttctatttctttttccttattcttaccttcgctcatgccaatctgcatgggtgtttcatgttggattatctaaatgagatctctacttgagttccacctacacattttgtcaggtgctgtcttgtttaatactctttccttgttctactaggaaacaagatggtttcttttcctttgttttgtgtctgtaatctttagtgtagtagggcattgggggttgatataaacatcaactcctggctgcgcaactgtaatgtacgtgacatgtcgaggattgttatactatattctggacttcatcaaagtttaccatcttcgactgtatccaagtagatatcaacagagtgcagcataaaatccattcgtcattatgtgtatagtacagcagaaaacatccttttcatttgccagtcagtctctcccaatgccgtccagagtgagttgtctttggctcattcacatagacatggcctggatagttagcccaacccaagatcatcccgtaactgactaccaggcccatcctcatcttcatccgtctcctcggcatcaggatcataaggccccctcctcgcaccaggctcacggtccaaatcctccacatgctcaaggttatcctcacgcggcgtgcgatcttcctcctcttcctcctcctcagtctcatcctcttcttcctcttcctcttcaacatcttcctcttgagtctcatctccatcatctccagcagtcggaccaacagctttctccacactcacgccccgcttcacccttttcgcggggttatcaagcatatcgacatcagcatcggcctgggtcgcgccttcgcctaacgcatcctccgtggagccattctcatctgccttctttggcttgcgcttcccggcttttatttccatatatgcctccagttcctgttcgagcctgccgcggaaagagtcgagttccagctcggagagggcgttgaagacgtctgatggggcaatggtgcgtttgagggttgcatcgttggcgctaggaaagcgagggttagttcgacatatcataccatgggatagagtagagcaaatcgtgctttaccatccaacatatttgggactggaagcacgccaatggcagcggggtaagggtgaaacatactgtgaagacagataagaaacaaacaccgtagcagccttctgcatagccaatacagcgtccttctggatcgtcgtattcggcgggagaaccgacttggcgagacgaatcgtcagtgagcgtggtaggagatagtcctatggattaccggagatagcgttagcctggtctggttcctcccctgcccatgcgtatatgaagagcccatgggtatggtgacatcctttaatacgcaatgcatgttcatgttgtcttacctcgacacttgcgcccgcctcagcccgagccttcaactgctgctccgtcgcaaagacgggcttgtcggtgtgcgccactggagacgagtgctggagcagggaatcatcaggatcagcgggcgtcactgaggacgtggatttgcggggtggcatttttgtatgtttgaagcaggtaggtaggtgccttcgtggcggttggttcaagggatcggggggttgacgatctgggccccccttggatattgaatcgaatcaaggcctgattgtttctctgtgaaggtcttgagggttgtgtctaactttgggcggcagttaactataggctttgaagagataacgttcgagggttgcaaggaagacgcgccaacgcgttagatttctcgatgcgcgagtgtggggggcttggcggtgatgtctactctacttcgacattatttatatttctatattcacttctacaataatatttattacaatctacagttttggtggggtttatttgcaaggaattgattttactgatgtttttataccattgaaattgagatcaagcctagggaaggatggaatgccaacataaaacgcccactttttggtatccagaaagatagaatcaaatagataatgagttcataacacgagcaggaagagcggcccttactcgaccatctcatcgtcatcaccttttccattgccccagagaccctcgatgctgaactccttggcccactcggtgacaacctttgtggtgtcaacaccaggctcgatatcgccagcaggagcatctgccgaaaccacaggcagcacgggtgcagtggcccagccttgaatgcggccatctctccagtcgttgataacggtcatggcagcgctctcgatgttggggataccgtgctttccgagacggccgcgcttgcgtgccacttggaccaagaagtcggtagttttatcgccattgccagggaagagggcggtgatgccgtacaactcgagcatcttagcgagaaggttctccgatgaggataaacgcttcatcaagaggttgactgcgggaatgggatcctcgatctgcttgggcgggacagcgttgaggagaatcaaacgcgcctgatcctcttgcttcttgttcttcttgctagacttgtcggagctggggaagacgattccgggcgagtcaatcagcttgagtctgctgtccagcttgacctggcgcaggctagtggtgacaccagcctcggcgcctgtggggcatgcgttgcttgagcccttgttcagacgtgcggtgagtgcgttgatgacggacgacttgccgacattagggtatccaatgacaccgacggagatggctcgcttcaactgcttggcgccggcgtatgacttgagggcacggaagagtgtatccgaagtacccttgattgtcaactgcttgtggtcgaaggtgtgtgcgttggaagtggtgccgctggatgccttaagggggagagtggggaaggagcggcgcaggtgaagcaaccaagccttgagcaccggcggcggaaccagatcgatcttgttcaaaatgagaatcaatcgcttgttaccaccgtccgccatcatgatctcgcgctcaatatccttagagcgggtaccctccgggtcgcgggcatcgagcacgtatagcacgacatcggcgttgtcagtgacctgcttgaataccttgtcgaattggcgtcttgagctctcctttgagtaagactttgagttgaccaatggcggggcagattcgtcaatagttgcgccctcctcgaggtcttcatccatctcatcctcgtcctcgtcttcatcttcctccatgtcttcgtcgtcgctttggttgtcctcgtattctacggcacgggcgcgtgctgaggcgagaagagcagccatagggttcgaatcattgccctcggcatccatatcatcatccataatatcgttctcatcgatgtcgacagccgcggtgccagtcgcgggcaggtcttcagtcttgcgggtttgtgctgcctctcgaatacgtttttgctcctcggccttcatgcgctttcgctcttcaatgtcatggagaagcttgtccttgccggggaagagattaggaatgccggggtccttcttaagttttgaccgccattcagggttctgcaaagaacatagtcagaaacttcgatcagaaccatcacgcggatattgtctgtagtaccttctttgcgagcttcttttgctttctcgccttctgaacagcagacttttcaatcttatgcctcaggcggacgggaacccgcttggaagtcttgcctgtagaccgttagaattgcgcctcagaaccgcatgagcgagaggtgaaagagtatcataccaaagccgctcttagtaaccattttcaatgcacgtatttgttgatcgcaaagaaaagtgcacagcaaaccctcaaagtctgtccgtaacgggagtagaaaaagttgagtgccaagatttcccagccgataagcggattattagttgggccgatctccgataattttcaaatgacgatgactaagcatgcgggacagttgctaaattaggtacatacccgactcagtggaggcatcggggataagcaagaaatatattatttgatgacaccttatcctccattatcctcccttggaattctggttcctcttactgttgatatttaacacaaaattatcaacaggctgcttcttgtttttcacaaaatcggcttctctttctactcactattgactccgcgcgcattcaagtctccccgcatcccccaccatgtcctcagcaacaggaacgttctctgcgcctgcgcaagtccacacattcgatggtcttctttctgacttcgatggcacaattgtggactcgactgatggtattcgatccctattcaagtcctcctaagatcaattggaaccaatactgattatccggtactgaatagccattgtgaagcactggcacaagtgagtcataaacacccaacatgaccgccgcgcaaactatctaacatgaattccgcttcagatttggcaacgatctcggcgtcgaccccaagattatcctcgcgacctcgcatggccgccgcagcatcgacgtaatgggtatatacgacccaaccaaggccaactgggactgtacgtatattggattctaaacccccaaaccgatcgctatcttccgatataagcaaaggatataaactgacaatatttcctcgccacagatatcaatgaagtcgaaggccgcatcccgaaggaatatggctccgacgccgtcgagatccctggtggccgcgacctcctagcagccctcgagacctccggcgcaagatggggtgttgtaacatctggcacgcgccctctagtccacggctggctggaagtgctcggcctcccgcaccccaagaacctggtgacagcaatggatgtgccgctcggcaagccggacccacgctgctacctgctaggtcgggagcagcttgagatcgaacattcaacatctattgtcgtacttgaggatgcaccgtctggtatcctggctggtaaggctgcagggttcaaagtgattgcgttgaagacgacgcattcgctggagcagctccaggaggctggcgcagattggattgtggaggatttgaggagcatttcggtcaagggggttgttgatggccaggtgcagatcgagatcaagaatgcgtatcaataggtggttgttgccatctcagttgcgccgattcgctgctgcatgggcagggatgtgctctttcatccacagctgcgtgacgagtttctttggggttggatgcacagcctaggcgtctcatggtaaagatgtcatgactttttatagaattaacgtgcactacatacacgttggattgttagatatatattcaaattttctagactttttttatcaaaccaagatttgtcttattagcgcagcagtcagttttgtcttgctagaggacttatacactagcaaatgaccacaatttgttcgtattcttctgaaaaacgaggatcacagttggtggtgttgaaaaacgatacctatactagagaggcaacccggattccagctgctgtctcagaccatgtaactggccaattgggcttttgagtaggaccgaatgctccccgaccacaagaactaggctctacatatcccgaaacggtacaaagataagaggtcccgaagtagctcaggtggttccccggccggggatgtaatcgggccaggcaaggtgcaaatgcaagatagaatgtactatgcacgagttccacatacaacccaccatgtgtaggtagttagaagcaggtatggagctcactctagcctcgcacacgaatcagcggtgctatcgccgttgcaataagtacggacgcatttaatgacagcagacatgtctcataacaaggatggcggctagtctagatgattcgaccggcaaggatcaaaccgtatagctgttgacatggtaactggacgccctagactaccatggcgtggcggacacctttcgtggttatgcagctacgcaatccttgcagctcgaagccggatttcttcagcagggcgttgcagcatgcaaatgtacctgctactcccgtctgatccaatcaatcaggcagggcgagccgcaaactaccgttcatgtacgcttgagccctcgatggatgtggaaccaggccatgagcgcggaagtgcatccccgaggggaatgacttcaggattgggaaaacaataccagatctgcttttattggagctgggcgttctggctgcagccatagagggttcagcagctgcacctagctctttcggggaaaggattagatgctcacgaggatatgactgcttttcctcccggcaactttggaacaaaatcattgtgtgaatgccattggtgggccaattggttctggggtggacacatcctacctgactgggggagcttggagcgagagccaactctctccaatggtgtcgaggaagcccactcggccggtgagaacagcatgcaaggggcctaggtcattccgctcatgggtcgggaagaggtgatgttcgaatgcagacctggatatcatcacaattaaccgaaccaagaaaggcgatatgggagagcagtctcgctctaaatttgagggattccttgtccatgaccctattacattgaactctgtatgaggatgtgtgatgacgcatgaggggcatgcaatctcatcacatacagcagatttgtcctaattcagatctggactatagccttgggatgcaccgggttggggggcgtgtccaatcatggtgcagaccgttcctcttgtggctagtttttgtagattattctgcttattctgcgagctcgagcactggtcccccgaaactgacaaatacataatgccaaggttatagttatgcagggcgctcgatatagttgcgcaccgccacaggcatttggtcagcgccacaagggattctcgaggacggatctatcacattgacagatctgcacggctgagccacctggcttctggcaaccgaaatactccgagcccctaaaatatcgtggttgacgagtcgagaaaagcactaagccatgcgccgccatggataggggtttgatatcataatcggagggtggaggacggtccgacctcggccccaattgaccgtcaatctatgaaggtttgagaccgaggaatatttcattttgctatcccactgtcgatcacatcaatttttcccggagaattgtgtcccattgtcttcaattttgcacactcgggcagtgtgtggttgttgttgcaagcccgatatttgagattgtgatttcggtgatgggaggggatccgtgcgggaacttggaaatacgttacggatcgatccaggggtcccgaggtcgtcatggtagatcccccgaacttttactacgaagtcgatctctgtgcaacattgctgaaatagcctaaatatgtactcaagtacgagaatggggcttgttatacggagtacttggaactccgtactccatatgttactgcattaaaggcgtagagaacatcagagatcggggcctctcggccaggctagagtaatatcaaactggtccatctctacgctgctcggattcgtctatgatgtagtgtactccccatgaactcggaccatgagaccatttcgtgagtgggttggtggggcatgatgtgccaaggcgaaagtgagcacaatcgcccaaaggaaggggtcgtgaagctgtcgggagtatcatcgggtgtgatgtgcgccgatacgcgccttcatgcacagaagcgtggacgggaacccgatttataagtttctacatcgtcacaagcacgtccatcgcagaattactgctgaagagccatagccaggtatcgatacaaagtttgaggggatcgaaaagccacgttgtgtacggatactctcgtatgatctacccactccgtggagctgctagtaccgtctcaaacaaggtctttgctctggatttttctccggagcgatacctcggtgtcaatcactccaccatagtcttctaatctatgactggctgaccgagcatgatcaacctaggatcactatagcgttggggtattttgggtcagatcatgctaccagatagagcagtcaaaaggtagatcactaaatcgaggaggggtgctcttgtggcttacagctagagcagaggttccgctaggccggttcattgttgccttattctctggtgctactatccatgtgtcgacgaggtcatagttcgggttcgctatacggtaggaggacaggcgttcggggatctctcgactccatagtttgagattcgtcgcccagggatctcgagtgtttgactgtcaattgttctgaacagctgaggtgaaagattctgagatgccccatggtagagtactatctacaatgtcctccgtataatggaactgcctacttaccaaaccaaacgtagaatgaaacaaagttgagacgaaaggttaccatagcgtcaaggacagcccagcagttaccggatgttcgggcagtgatcatctttaggcgcatgtgcatgttaagggggtggacaaagttggggctgcaatcctcgtgacttgcgtgcatagaacgtcttattccagacgtttagcgcttgtacaacatagagcagctccaaccagaatcccgggaaaaggcaagatggtgtcacatacgtcgaatatggttggagcctggaaaaagccgaataacagggggcacaagatatgtgctcagagagggggcgccacatccaaagaaagagataaagaaaaaaagctcggcagatccttgagtgatcgacgggggatctgtcgactattgatgtttagtttgtcttggctgactgccatgctcccgcactaggatggattggtgctagtggaaagggggagactgtcagttacagatagctgacacctggttgcttcaggagtcactagtctacggagtcactattatacaatgtgcctttgtagatagagtagacatcatcatcatcgctctccatgatcgtgacgatcctcgaatcaaacaaccgtattgtatcggggacctgcccgatcgtctgacccagagcaccggtctccattcaccccggtacgagggaacgcctaggactcgaccgggatgtttagggaggaaatgtgactgttacctaaagcagattgattagttatgcaagtccgatcacccacgggtacggaattccgtaccgatgtctagttacaacttgacgacgtcttacgtgtaactactccgtagggctatgaacatacagcattgtactcctacggcattatcgcacgtaattcggtacttactagcagatccactggtgtttctttccaaattaaattcttctatagtggacatgattttctttgcagcgacgggcacctcctgggatcggacatgacgctaatgcaggaactgggattttttgcgtttgtgtttttttggtttgtggaattcgcgggacacgaaatggtggtcctcaagccgtgaagagatcttacaggaggtgtatcccgtcgtatatcggtattttaaatcctataaaataccgcgggaggcatccgacccaaactcggctctccgcatctgaaccctggctcacctttgtttaatccgaagcttactagtataaggtacactaggtacatagttataggtaattccggtgctgtggcaggtatggaatagaaacaacgattcatacgagatcggactctatggcgcctcgtatgctatgctatttttcagtcacacgtccatgttgaaataggttcacgaggggggagtctggacgggatcggaattatgttatgggccaactctattctggaaacagaccaaaataaaaaaaataaaaggataaaggatacatcgtagagaataagaataaaatccaggatattaaaaaatcaaatccaaatgtgactctgatgcagtcaggccgccaccccctaccgagcgggcggtagcgcgactccacgggctaaaaaaggatgaaatacggtgggggtggtaattcggctttcaattcgtggatggttggagaagcagacgatccccgatctgaattgcttttcattgcgattccttttccaggatttattcgaatttgtatttaaaatcttatttcgatataattgagaatataatttcgatttgctatactcgatccaagtataggtacccgccccccgggtactgatagcacacaagtctcatgtacccagtacaggcacagacctttgcaaggctgtttcatctgattccccgttactgaacaatacccacccaccacccaatcataccacactgttcggcagctctgtacggcgctttaccagccgtcacccccgatcttcccagcgcctcatctttctttctcttcatccttttccttcccagtctttcctttacgtgactttttttgctttttttgctttctttttccatacacactcttttgggtccctaattcccgagtctctccttaatatcgactattatcacaagctaccgctgctcatttctttttcttgacggactacccgtactgccactctttacatttacaatcaaggtccctgccgttcccatcagaggttgaaccaacccgaatctacttcatgatatagacctcgttcctcgaacctgccactctcttgtgcagccccattcccgtctctatctctcttgcgcccccacggcttcttctcccctatacttgcccactctttgctcccgatcatcatgagctatattcacccctcatggaactaccagggtcaccagggtatcccaatggaccaacacatggcatacgacccgtccatggtccctccgccgatgatgcaccctatggatggctatatgtatcaccacccgccaatggagatgatcgactactaccaccaaccgattatggactacgacgaatataccgaaaatctgtcacgaccgcggttgaccaaggaacaagttgaaaccctagaggctcaattccaggctcatccgaaaccaagcagcaacgttaagcgtcaattggcggctcagacaaacttgagtctgcctcgcgttgcagtatgtgaaatagaggctataaccttccgatctacagagagctaatcgaatgaatagaactggtttcagaatcgtcgcgcaaaggccaagcaacagaaacgccaggaggaatttgaaaagatgacgaaggccaaggccgaggccgaggaggctgctcgccggaaatcagagaccttggaccaactgtcgggatcccgaaaaggatcaattgcgaaggaggagtcggagagatccgctactcctaagcaaacacctacctccacgtccagcggtcatgccaagacagattctacatccagccgttccaagcaccacaaaacaaagagcgagtcggcaagagaagcaactttcgcatctctgcagagggcgctgaatgctgcctgtgctgcccgggatcgattcggtcgccggattaacccccggagcaagaatgagtccgttcccgaagaagaagacgaagaagagacagtgtcccctggctcaatgccaccaccgaagacgaccactccagctagtgatcatgggaaccttgccaacataaacacttccttttcaggttggtctggtatcaaggaagaaccttcctggggatctggcgggcacaatgagaatatgggatacaacacagagcagacctcatattccgcttgccaccaatcaatggcagagatgtcaaatcacccccactctatgcatcagaacttggacgtctactcgaaccacctaacccctcacagggacgagtggtctcaggacagcaacccacgacacgaacaacttgtctacagcaacatgcaatatccaatgtccatgcaggcaccagatatctccgtcacacgtcgtgagtcttctgatgcgctgactgcctcactggagggcattggaatctgtaccggccaatctgggatgtctcaatccgtcgatcgagcagacgggatttggaaggaacccggcaaggagcttgatctcgccgcacgccgcaagcgccctcgtcccgctgccattggcacttcgggaactcgtcccttggccaactcgacctcgatgtcctcgctctcgcctaccgctcgtatgcctaatcacagtgctggcaactcgatgagacaatccaagtcaactcagagcctcaactcccggtatgcaggcgtgaggaaggcatcggctgcccagcgctctccactcaacttcacttttgcggattctggttctatcaagaaggccgagcagatgctgcgaccctcgctctcgaccactagcctagctccacccactcccttgactccgcaagacctccagaatttcatgcctgcctcccccgcggatagcaactactgcatgtcggcccactccacagcccacttcttccctacttctcaacccatgcaggtcaacatggcatcacctcctgctacgccaatggatatttactctcccttcccttatcaaaacgttgctccccctatgtcagctccggctcacgtctcttccttccccgagtatatcacatgtgactcgattcccatcccaccccgcagctgggccgacactgcttccatatcttcgcccgagtacccggctggtctccaggtgcattcaaccactgtctcgcccatgggctataacgcgaccaccgaccataccgggcaggcctttggaatggaatcggtctctggatctccgtctttgatctattcgattgaagataccgatatgccaggctctgcagagctcgcggagaggaagcggactgaattcatgatgcacgaattcccagagcacgatctccagtatggtggccatcacttgccatcgatgcagaagccgaaagcctacacgttcgcaaacaacacgacaccaagtaactacccttcctaagtgaaggttcattgatctttcccttaccatggatgtatgagcaatgcgcgacaacttttggtgtttttggtctactacaaaaatttctgccttcaccttcgttttcctacactttccctcggggagatgttgtatacccaaccctccgtgcgcgaagaagcactgtcactttatgtctcctatatactattttccttttcgtgtctctttatttggggtgtattcaccgggtttttacatatttggagcattccttgcatgttgtttattggcctaggagtgtttttgttattttggtgtctgataggaccttttaatttctgccgagcttcctcccgggaacttcgagacctcttttaccttctacctttgtctactcttttttattcctgttggaatcggttttgtggattggatttgaacttgggtttgcatatggctttggcagcatctggctttgatattttccacgatatatacacttgttatgtatctacactatctcatatttctcaatcaaatcaaaaaggggttgatctcttgcattttggcatttacccgaaataaacccgatcaaccagcagacggtcagggcttggctattaggccaagccatcggtgtcttgccctttttatattgtagctcgctcatccgagtactttgggatatactccgaaggtacactgatgtcgtacaataatggatccagcacgtgcgccagaccataggttgtggtgtccggaaccttggaacgcggaaaagcgcccctggaactcaccgtaaccttaactaccacgtgcgctacagtctctcaaggttcgtacctgtgtataaaaggagcatatttgtcgatcttatcccaagagccagaataaatttgtgtacatatttggacgttggaattgaaacccgtgtatctccgtccgatgagactatccaccctcggcacagcccttgtgggcctagctgccgcgcaggcatcaattatcaattactccgcggtcacaggctacttcctgcaagatgaggcttcgactgatgcctctacatttgactatgtaagtgaacaaataccggcgaattatagcagaaacaatctcttcgtcgacgccttattattcggtccgctgacatgttcagacagcggagaacttcggcctgatcgcccgctcatatcccgcagacaagaatcacaagaagcacgaatctctgacccaatgggaacgcttctaccgccaggtcactgcgttgaatgatcattcccccaaggacgtcgagtacaaggttctgttccttggtcgacatggcgaaggatggcacaatgccgccgagacctactacggaacgccagcgtggaacgtaagtccctacctatgaaccaccttaacgttacaccaggcccaatctcaccacctccattcagtgctactggtccgagctcagcggcaacagcacagcaagctgggcagacgccacactcacacccgacggcatctcgcaagcgctcaaagcaaacgagttctggcaaaaggagatcgatgaacaacgaatccacaccccagaccaatactacgtcagcccgctgacacgcaccctgcaaaccgccaatctaaccttcacgggcctggacctccccagacacagcgcgcccttcaagcctaccatcaaggagctcttgcgcgaagggatcagcatccacacctgcgaccaccgccgcagtcgcagctacatccacaagctattcccgcactggtccattgagcacgggttcagcgaggaggacgagctgtggaacggcgtgacggccgagtcgagcggcgcgcaggatatcaggagcgcccaggtcctaggtgaagtgttctccgcttcgcccaagtcgaagacgtttgtgtcgatcacgtcgcattcgggtgaaatcgcctcgattctgagggttattgggcaccggactttcaagctgaataccggtgctgttattcctgtgttggtcaaggctgagaaggttcgcggtaaggcgtcgactacctctgtgccttgggaggtgagtccgcattgtacggagccgccggttacgtcggttacggcttgtgtttgtccttccagtgcggtgcctgttacgacggctttggctactggattttagagtggctttcttggctgggttgggtgtgtctaatggttttgcttgtacagacccgatgtaccagcgaagcaatttgtgatggtatttgttacaaataacgggctgcttaggactccttccaatgttgacggcgtggttcgataatctggtccataggcttaagatggtacaaaggatacccaaacccgtatgtaatattcaagattcctttctctatagtatctttcggacaatctactttgagggccttaaataatatctttttgatctctttctattctcttgttgatattttagatgtcgccccctctcctctattcgtactgccgcttgtgcggtgaaaaaaaaggtgtaatatcacacacaacatgataggttagatgctaagcaaaaaaagacttttaacaaaaagaaacgtccccgggaaggcttgaacttccaacctcccgattaacagtcggacgcgctaaccaattgcgccacggagacttgattgtggcagaggtcaataggaatggcattatgagcatgttttaatgcaatcgattttatagagtgtgaacagatcatagctggtacttaattaccccccttactattgacctatgagtaacgtgtgagtaacgtataagtaacggctaagtaatgtttaagtaatttctaagtaacgtacaagtaactaacgtgcaagtaatgcgtaagtaacggctaagtaacgcgtaagtaaagtctagttgagcaaccaacgtctaagtaactaacctataagtaacgcgtaagtaacgtctagttaggcaacttctaagtaacgcctaagtaacgtctaagtaatgtataatagaggcttggaattttatgaggctccggaagcttcaaaggttctttctccacataactatgcgccttaccgtgattagtcatcttttagagtttttgacatacggtatagccctaggtcgctcgaaagtcgctatatatcatgctagtactatacctcccatactctttcgacgttgatatacttcaccactatatctcctcatcaccgcgcgtttatgatgtcgtttcccacaattgaaaggatggcagccatcacaaggctggtacatcagcacctttcttccctttcttccctttcaatctaccataacaagcttgtatccatcaaacaatccttgttttgtctctgtgaagcatctattgtgcacttgttgtgaattctgacacttgttatattgttcctatcttttcgggttcaattacagcaatggatccatctcaggctcaaagcctgcccgtgtcgcagctgtctgccgtgaccttgaccacgtcgccctcggattcactggctgtggtggccttaaacgggtcgcccactcagcagcctctaagtgatgctcctactgacatctacccttcgccgactcctcgtgatgacgcacagtctaatctgggacgagagtcatcgctcccacctgaaattttggaaatggtaagtaacccattgagccaagccaatgcagcctaggtctcttcggccagctaaccttgtctcagatcttttatgccgtacttgaaagtcctcccgcgtttgaggaatacgacttcatttatggggatgtcttcgacagcccggcgaccaaggaggctctttcgactttcagactggtgaaccgggcctggaacttcgttgcaactcctctccttttccgaaagatccaggccatgatcggatgctctactattcgaccccttgataaaatcctaatgatttctcaaagtccatacgctctttacgtacgcgacgtgcactttggtctcttgggaatatggctgcccggactgggttatgatcagtacatcgaggatctggcagaaggaattcttccgctcctgatgagtcgtttcaagaacgtccaaacattccggttgcaagcaccccccttggtagactcattcagcccattagcactgctcatgccggatatgcttgccaagctgacaaattcttttgtgcatactttgcgctttatacctgtcccgagactgagatgccttcatttgtctctgccaactacggcggaatttgctcgtttcttaacgacgtactcatactccaagagcttcgccgaaatttgtgccggaatcgaagagctacacatcatcatcaatgacagcaccggccttggtgtcagggcaaccccgagacgacctcgctcattaatcgaggccgggtttctaatcgggcaatttaccccgtatctcgtcctactcatctctcatgcaaaacggatccaagtcctcagcttgaatgcttatagctggcttgatctatccgatctgcaagcagggagtttctctcaacttagaagcctccggctcgaaggtgtgcaggtcaagcccgagactctccatcagattttcatagaagctcggaatacgctgcttcgcgttgaattgatcgatgttaagctcctggccggtacctggtctgaagtttttgatgttttccaatcttctcgattgcttcctccccctaacctcaactggcttcatatttctggatgtggctacgccatgaccggccaatacactactcgtggattctcggaagtccgacaagcactctggtccacccgtggccaggactggattggtcttatagcctggatggcgatgacgaataacaaccgtagtttccagggattgcctccatgtccgcattcttacttcccgactcccccagtcatcaccatcgactattagtcggatgcattgggagtcggatttacagaacaaagaggtcacaggggggggcatcatgatttgtaactgctgttctggtttctggtgtctgggcttactgccggtagacctcgcttggggttttcccttgctggggtgtctacccggtgagtaactgctgtccattcttctctgcctggttgtttcaatctccaggagaggtatgtaagattatttgtcgattctgcgtctggtcgtcttgacctccaggcgtagcaaatgtaatttacgatttctttttccttcctttttctggagtgattcttttcctttcctagtctgatttctgggtatgcggtatcgtagtatattgtaaaattgcgagaagctagtcaacctctgagttagttagtaaattagttagtcttgcacccatgcttgaataattagttggtgacttgtgctttgcggagtagcatgcctctacaccctttcacttgtgggcgcatctccccagtttcaatgtctgaagaaatttaggttttcatggtttcacgtcgtttcgtcttttcttcgtttttgcccttctcccttgtggctacgagaataatattgaaactcccaaccctgatcccttagctttggttcatatagcataaaagtcggtcgctcttcatcaaataagtctccgtggcgcaattggttagcgcgtccgactgttaatcgggaggttggaagttcaagccttcccggggacgtttgttttttgattttgaatcaaatccagttatctcatttgcaaggggacattcttgcttctgtcttgttttttagggttaattttttgggggttctagtcagatagggtgaggttggtttaaactcagtcgtcgaactttatttattgtactgctcaattgtatccatgggtgtatcgtacatacatagcccttctttatctagtgcatcatttatttggccgacaataaaacgagctatatgcagtccctagtatctcggtcatcttcgagaagtaggaggaactactacttgatgttagcgaggtctattcatatcaaagacaggaactaattgtgactactacgtggtccatggccatattctgacgacaggttatctcgcttcatgggctgaatagaccagttatgtatcactctactctttattgggacagttatagctccagacatttggaggcatcggtgtttgggggtggagatgcttagttgatgttaaagtgttgtacgaaaacagctatctagccggttggtctatggtatttacattacagtttttcataaaatacttgacatgtatatgtagatcttattcccttcagataacaatggatatctataatgccaactcgtgggttgttctggtttggacgggattgtatggtttgcgtcgtcgtgatgataagcaacccagcgcagatgtgatccttgggttgattatgtgtgagtaaatgtccgggttgtaggattgggtggcactggatttgaagttcgcaggcctgggtcaatcttgtgactccgggaagtgtgtatgtctgatggatgtctagttgattgtagagttcgagactctcgatggctgtttcctgtcgcgttgcggggatatgtcatctccatctatggtgtttgctatgtttattctgtgtttatctatgtagcaactggtggccagagcgaacaagttcgaggcatggtcggacgaagtagcgctgtgacatatatatatcatcgccgaaataacaacatctcaaattaaaatataccctttgttttggtgtttcagctggggaatgaagagatatatatttgatgagatcttcgaattacttgatccctgttggacaaaggaatttggattaatatgtgcatgataatatactacgatattaggactgcttgctgtgtacgacaagcatgagctttttataattccactgtctcatgtctatttcatgaaacaagtctccgtggcgcaattggttagcgcgtccgactgttaatcgggaggttggaagttcaagccttcccggggacgtttctttttgttaaaagtctttttttgcttagcatctaacctatcatgttgtgtgtgatattacaccttttttttcaccgcacaagcggcagtacgaatagaggagagggggcgacatctaaaatatcaacaagagaatagaaagagatcaaaaagatattatttaaggccctcaaagtagattgtccgaaagatactatagagaaaggaatcttgaatattacatacgggtttgggtatcctttgtaccatcttaagcctatggaccagattatcgaaccacgccgtcaacattggaaggagtcctaagcagcccgttatttgtaacaaataccatcacaaattgcttcgctggtacatcgggtctgtacaagcaaaaccattagatgtatttttttttatgcttccatccatctcttttcgcgctattataagacaatagacagagaaaaataatttatatttttacatgttgtattagttcaaccaaatagaacagaggataaaaactaggatagcggctgcagcgaataatcattgatatgtatggccatccacctcgcaactacaagaacagtcgcgaccaatatggaaccagtcaaagctagatatcaatggagaaaaaaaaagtagggttgaaataccatatcaactggaatcaccagaagaaataaagtatggagagtagaagaaaccaagtagagaagagaaactgtcatctgacaggtacatgtatgtaatcgcaaaataagaacgaggccataaacattgatacatatgtaggcgagaacatctgggtttaaacaaggatagaactcaaatacacagggaaagcagatgccagcgaacaaggatcacacttctctgaacagctaagcgaccatcagacatctcgccaaggcaaaagaaaactagaccgtccacagtgattcaccctctattcatgtataagtaatagaacgaaaacacacatactcataatcctgtaacactctgtccaaaagggtagaataaacgccgagcataaggacccaacgccagtaaaggcataccaagaaaacaagaataagtaaacaaaggaacaggaacctcgaccaagaacaactcaacaaagggtataggaaggttggcccagattaacattaaccgaacatccttcaccatggaatgcagtgaagaatgcagtggaacattggaataggagaaaatttcaggtatgaatgaaaccatgtgataaaagtagaaaaaaaaaaaatcgagcctcagatgatagtgtaagctggtaagaagtaaaacgcccatctagataacgccagctgtcgcgagctagtacgaccacccaccccctaagggactgccagactggcccggttgaggttgtcctggttgcatcgggccaccaggtccgctaggccacccaggtataccattgcctgccatgttcattgcaagatttgcctgttgagggtttccgcccatgaagggttggccaccatgagcctggttgggtggatacatggctcgtgccatgcccggataaccggtcgggttgactcccggatatcctcccatgccctgcataccctgagcctgcgccacctgcgggtgttgtatttggggatattgctgaggcatctgaggtattgattgtcgctgttgattgcgaggagactggtggtgatgttgctgctgcggatgatgcccgaggggagatgggctttgttgcggagcagacatttgttgaccatactgagacattccaacgccctggtgacctgaagacggcaacggggagggctgtggctgtggaggtggctgcccccaaatctgctgttgttgcggtgaatatccgtatggaggaggctgacccataccgccacccatagatggattgggccgctgttgcatgagattgggctgcatgtttggtgggattctcaggggagactgtccaacggactgtgggtgagcctgctgggggtagtttggttgtccacccatcattggattagactgcatgggaacctgctgagggagcatatgctgcgtatgagcgggattcggcatcccggcagagggaatctgtgatacctgaacgggctgtgacacagacaaacccgattcgagagcggtattagactgggcctccgagaccggggcctcgcggggcttggagtaaaattcatccaagcctttttggcggaaactgcgctgaatgctcaacattttgttgaaatcagacgtgtgttgggcttgattcatgaggtctgctgccgagcttgtttgcgtgcggtcgtggtagggttgcccggtcatttcctggcgtgcacgaggcatgactgtgtaatctcgcagccgggggtcatccgtcgtcgacatatggatcatagggagtggaatcgaagattcagaagtatccagcgagagcccgtgcggcaatggctcgatggcattactgtagacaacatcgttatgaggcagcgccggcaacaggtttgtagctggctctgagacggaaccatcgcgagccttagccgcaccaggacgtttctcacccgcgaggtcatcctccgtgaagccctgctttctagctttggtctcccagtagtcatctcgaacccgacggccattcacaatcacccggctcccaaactgtcggaacatggatctggcagagacaatagcgatttggcgggaccgataggaatatggcaagatatcttgctggataagatcgtctttctcgatttgggaagcaatgattttatgcaacgatcggttcttgttgaacaaaagatacgaatcacgataattcaataccctcgcgcactcagtcgcaagcatgaatagtttgttgccccggaggggaacacggaatgtccggcatttatactcgcggccaccctgcggatatcccataggatctgccttggtctctccagcttcatcaaactctttagggatgtactcatcaccttcttcattgagctggtctgaagtgtgatctctcacagtagggagcgctttgactagggatttcgttggtgtactcttgctgtccggtgatgccagagacggcgacccggcggtggcttgcgacagtgggcgtgcttgcatttggggagtttgaataagcgtgtttgcgatgtgttgttcactagagcttggccgaggcgtctttgggggacgcccgcgcttgcggcgactttgttcctctaaaaaaagagacaatgttagcgtatattgaggtacgcaagctgtgattaggcaaagtgcaagcgctggtgggaatatagcacagttctggatggaacctattgacaatgccttcccgctgccaacgtaccatcgtcctgatccctttcgacatgtccatttcccatgtggtctggagtgcgactacgcttgacaccacgggggcttgctattgcatgggaatgtgctggtagggcaacagagactaggagtatcagtttgaaagcagtgacggggaaggaatacacaaagagacgagtcaatgagtaggaaaatatgattcattccagcaagtagtcccatcgatagaaaacagaacgcgcgcaagaatttgtgattgaggacgaaataggaaatgaacggcacgaggccaagacaagaaatgcgataagacacataccggggttgcttaagttcgcgggatcgatggtccccgaggggccatcaatgacatctaaaccattcattgtagataaggagtgagaagtgccatacatagcgggtcaaaggtcggacggttagagcgcccgtcgcaagatggcgcgtcaagtgaacgcgtaaggtattcgggcagataaggaatggaaagtggcgcaagagagcagaagatgctcatgcaagactttcggacctctaaggtagatcgaattaggtcaagtcgtcaaggagctgccttctaggtaggatctcggatgaacttgggtttgagaggggaaggggatcgaggcggtgaagatgggagcctgagtgttcaggtgttctgcaaccaagaggacatcaacttgttaataatgggatataatcttgcgcaaatcaagattttgatctctttctattatgtctctaccggggagaacttaagtcttgcaggggcaataggaaatagggaaaaaaaagaaaaaaaatagaagaaaacgatcgtctggtgattggtcacgagcaggaacaattaggactcacaagtctgctgctaagaaagtggcaccgaatcagacaaaagctgggctaattcctgcaggttgaatctgttttgggcttggtagaggctaggccaagtcgtttgtcctagagagctccgaaacaagtaaaagatacccacgataatgttggagattagtaattttctccccgggtgatagattgatcggatattgaccggatattggctacgataaaatgatcagatctgaacgaggccggagggaatggtgacctttttgtgatcttctgggcgtcgcgggtacggcgccaatatacgaatagggtcgataagagactaatgagatcatagacggtagcactcagctacagcagaagcatagaaaaatgtagttttccttctccctgactcctttgcctcctacataatccaggacgattttccgaggtagcacagcgatcgaatcctcgatatgggagttgagaaacacggagaaggaccctgcgtcttttgggcaatagcatccagacgtatgcaggaagggcaaaaacagagaaatgaataacgaattaaaaaaatcaaaataaaagaaggtgcaacagtagcacaggagtacaacgcgctttgggtttggattcctaactaggtacagaatacagaagatgtccgcattggagccaatcacgaggtcaatcacatctgaagtattggtattgtccttgtattcataaccacagttttaatatattgttgccgatcgttagatgccaaatatttcgagtatagaccatgggagagggtataaaattacaaataactttgtttgggtgtacctgaatggcctttttcctattccgatttcgagcaaggtctatcacaacatggacagagtctagacactatgatagacctcagatagagccatgatcacatctattcagtctggatcgtgtattgtgtaacttgacgtgtcttaaacagctactgggggtcaaatttatagacgaaagaagcaagacgtgaaaacgaagagtgatgaatatcggacgaagctcacagacaattggctccacagaaaagagacgaaattattgatgattcttgcgtatatgcgtgtttctcagccatgtccactagtgtagtaaacaggatctcaaggtccaatccgaagcaaagcaaccaatatgcgcggtcggattatatcgggtcaagcacgaactagaaatacaaaataagccacctgatactcaaatcgtcctggtcgtctagactcaaaatgtagttcttgttttatgccgacacttaacaagccgggcgataaccggagaaggccatagtgaggggccattagataaaagtaggaagaaggcgagaggaatgtgctcaggccgcatcttgtcagcctaacaggagctaactatcgactagttagacctagtgctttacggatgatgggcggggtatgctcgtgcgagagacttgatttagctcaggattgcttgattcaaatttacccaaaggatacgtgctcatggttctggggatgggagatgctcgcattatagtaatgggctagaaagcctatgatatatggtttataacggggagcgaacggtcgtgattacaatataaataaaagcctcgtgttgggtgtcggtgttttcacagcccagttgaggcatttaattcgccagaggatgggcggatgacctgcagaaggcgctgtagatggaacgggcagggtcatttgagcgggaactccctgattagtcgatcaacgaacggcccatgcgcgacttagaaagagaagctagctcgaaatggctctaatcagcacaatctccaaatcatccatcgtgcacaccctttatgtcattagtatcgcccaaatcggagtaggcttgagcccatatactcggaggcggctgtacgaggtagagcaagatgtagtatcgtcacacaacaacgcccgtcgagacagtcggactgcactatgaagtatattgcgaacgtacaaggttcgaaatggaaaaagcccagatatatgaacgctgtcccaagtctcacagcagcccggtcttgcagagctgccgttctccacgctcggcgccggcttttcttgcccgtcacacaatgactggatctgtgctaggcctaagaacacaaggtgaccttgcagctctaattaggaaagactgaatctctccatcatggacgctcgatttagaccttgagccacctgggtcctttagctaacggacgtagtcgatccatggcccggatgcaacatactttgctaactaacaccttgaacaatggattaacattaacttcgtgaaccatcgactcccgccgagtggcgggtctgttctttgttacgcatatttattgggttatgtacttgctcttaacgccattgacagatacgtacgtcaggtaaagaccctatcaatctcatcgtcaaaaaacatttgaagataaccaacgacgatcgcgataccgccacttcctggtgaaacccaatatatatcgttggcaaacccccacttctatccctacattcctagagacatgcagtggacgcatgcggagcagttgattgatacagatatgcggaggagaacatcattcattgggacaagaaggcattaagaatggcagagtagacatatccaatcgcatctccagcctattgcacttcgactcaatctctgagcgagagcgagttcagaatgttcctcccttgatgcaacatcagaaccgaattgtctccactaagacaacaaaggacaagaatagctctggccaagagttagattctggtagcttactaccgtcgatgagttagaggcgtacgcatatcatgtccctatcctatcgttattctgagtatggtaattccaggaactaccatccatgatctgcgtagaaaagacaggcatatgccgtatcaaaagcacgtgtaagttgtatatacccacgcgtcacaagcaaaaaccaagagccacagtttcctatttaatataatgagcatgcttgacgttgccctgagagttgcgcctccggggccacgcgttgcacagacccgcttctgaagtggctatatcctagctttaaatctatcagctcttttaaagctatgcagaccgatttggctcacaattgtagaattggcaactacatttgtatatgggaatacatagcagtgcttgattcatcctgtataccatggcgcgcagatctataatgtagagcgggcctgatccaaatcccgaaaataaggaaagttctcttagtttggatgtaacaatgaagactggaagtaccatgttactccgagaggctgcgctcatggacttggtaagatactgctggcacagcgattttgagctaggttaagtttgacccactacttcgtagtatgtgacgaatatttaattcaaaggcgcttatgcgatattcatcgtctgagatatcccttctgttgtacggtgtatattctagtaagcccagcaactagcctagttgcagctgtatgctagatacccggagatgagaccttactagggaattgataagcacactctcaaagcccggtcacgtacatgcattagcatgcattagcatgaattagatttgctatttcttttaggctgcaataacaccagcactagtactagccggaagtgctcggcgtagagaactcgtgactcggagatcgagtaagatctgcagggtatgaaacccgctaagcctaaaagaggggtgtttggaagacccatccggtgtggtgcaggagttcctactgggcgtgcagtgtctgagggagttagttacacgattagtttagtaagagtttgcgtgtacatcgtggatgttggatctactagtaagcacattaggaccgtctttgcaatatgtaagtacagtgttttgagcaggagtgtatcgaatacggttgtcagagagaaccaagaagaagcatgtattctagagacctgaactacccaatgtttcccggggatagcatcactagcaaatgcgacactcgggaagacggtcttgctttccttcgcctgcaagaatggctcaatgaagcctttcaaggaaaacgtttcataatcgaactcatccatgacgcctgaataagaactggagggagagaaaaaaggtggagacctacacatcctgaaacagccaggtcgatatggtaggagtcaatgtcattgtagtacaatgtcttctatgtccaaggagcacttgccttgtttcaagaaagaaggaagggaagagagacccagagatgctggtaggacaaccgggccggatccggatccgaaccacggtacggagtagggtaagagtctatcccgagatgctccatcgacgacaataatagtactcgtatattgtacagttgtcagtttgaagtgagcgtgtcagaaatatgcccgaaacagcgcacagaccgaagaaattagcttgaggtttgagtgggcagttgtaatagaatggtagccgacagatttccgcagaacggccggaacgtaagaagagcctcctgagctgtcaattcaaacccgaaggctacaaataacatacacagaagagtctatatcgtatattaagcatttccccgaccttttttgctgtataatacccaaaataggccaagaatagggagaagatctctaaaaagaccaccatcgagcactggagtctcaatgaaaggccattcttgtctatatcaacacagagtaacggctggactgattttggtgtacaactatattgtagcaaggagcggacttgatatccagtgctaaaatgcaataaccttatgttttgaaccgaggatgaaggtgtggggtcgaggttattttgccatgcaaatagggaaactttgccgaacccaatccgtaagaaaccgaggtccatccgagaggcgtaaaacaacaaatcgctcatcatgttaacggggccagtaggatgctattctcgttattccggagtacagcatacggagtactcgtatggagtatcgactggatcgcttatgctcggtcttcgcatggatgatatttgttccggttcgagaggcgatattttgtttcggatgtcctttgttagccgttttacgagtatggctgcagccatgaaacctctagttaactagctgcgaccgtcaaaaggcacgacttggagcagccaattgtccggcgaattattagcttgtaaagcgggtgtgcgaactagtccgaggcgctaaaatattgtggacctcaccaacgtgtgtgagcgggtacagaacttgcttcctaagcgtcctcaagtgtccagcccttgacgagagattctagactttgactttgggcttggtggctgtaatggctttaattatgctggaattagtggggttatctgcggcagatctgaccatctcttccttctcatcaacggtgttgcatctgcaagtttattgtagtcgcctccgtatgttgtactattatttaatttacggaggacgacagttgaccggagagaactccgtatttttcgtccatgcttggcttcctatttgattcaaggcggggctgttgtgaaataggaagtatcggcagggtaataattccactgctttattctgttaaactcagcggagttaatgcactccatcttcgcgcgccacctttttggttttgtccacggaaggagctggtgtaggtttccagcgggggtctggagcattacctccgtcgcacgggcggatgttatgaccaaacaattagggccgtcttcggcggattcgaaagatcgtcaggaggggcatattgaagtgtagtattgtggaatgcttggacttgtcggtgtggatgttctagcattatgggagaagacggtgctcgcacttcttatgtacaccatactaggatacctaacgcagtggaatctctggagttccaaggttgccgggctagggtttgatgagtcacccagcgaaaccgaggaaaccagttcctacctattgtaggtaactatgaagagaagaattaatctgattttatctagccatgttgtatgtatgttgtacgctgagagagaagaaatccgaaagcaattaatatacaaaactgcaaacgggctcaggatgaggggtttcggatttccaaggaaagtaatccgtggggatcgtgagtttccccgtgcaacgctttctattttattctcttttccctgggattagggcgaataagcaagataagctccgcagaagggtctccaccgaaaaattttcgaagcatcaaatgatcaggaaaactggggccactgtgagggtccgaatagccgctactccgggaatttcttttgcccctttttagccttggatgatgaggtgggatggaatggtgatgtgaacaaagggaataaattgtggaaaatattctaaaatgtaattcttcacgaatatctaacttcctggggtagaatagtctaaagagcacgtagccaagtcttaaacaagaagaaaaaagacgagacccatcagagcctggaactcagggaaccggtttcgtgatctggtgacacggcagacccagggcgcttggaccaggttccccattattcttcgagggtataagactcgttgcgcattcccacctttccctagcctttccctttggaacttccccccaggacttctacacattccatctctctaaaaacatctcgggaatcatctctctatcctataacccggtctatgatccccaattaaaacacaatgaatactgccacgcaaagaacacccaagaccccgaaaccaaccgcctccgtgccaattgtccaaaataaacgctggccccccatggcgaaccgaaacgcccttccctacaagctcacccacatctcgaaagagaaactcgcccgtgaagccaccgcaccagaccctgacctgcgccgttgcgtggctcacttccgcctgcactgcgggtccgtctcctggaccgagaatgacatgaagtctcggatcagctcttttgatttcgaagacaccgatgacgaagacgatatggaggagatcaacaccgaactgccggtcctgaaaaacagagctccggccaacgacaatacagtcgaagtcaccgaacaattatcatacaaatcagagcccgtcgctattgcggctaccccggcatcatcaacatcaccagcgtcgcctgaaaatcccgagcatggttttttggaaaagggtcgcaattgtcttgaggcgacctccaaacatctatggacagggggatcttgcatagtttccccaatcgcgggttaacctcgccgccccttcctacattctcgacttgcccaccttttttctctcttgatcctttgcggccgacactacgatattacgacttgatgaccataatgaacacaccaaaataaaccatttgtatataactttacttttcgacaatatgtcattcataattaccaaggaaccttttttttttttgctggacaacctgtttttcttattacaccataaatatcgaataacaacagccttatggcctatggcccattcaaactcggaactatttcctctttcactcttcacttccccaaactcctcactctcactccccacatgaatctattcttggaggttcccaacccagaaggtcaagcgaagtgactcacctgccgcgtcgccccaggtcacatgacacatacccgagaaatgaaaaaaatagaatctgacgatctccaagacgccaagcaataatcgtcaatcctggagaactaacgcaggccccaaacccgagaattgggggctgtggaactatgattttcgccgtggaatccaaaccagccaggaagaattctgtatggtggaaagtcgcagatgcagtggcgaatcacccgccgatcggctcaggtttcatcatagtcatgtcacattctcatattgaacggtcaacataccccggcttcaaatgacatcccattatatccctgccatcgttgacaaaagcacccgccaataaattggtctctatcaaactagtagattaatggcctgacctgacgtcgctatgatcctcccgatcgttgtcttgactgaaattgagttgccagaatgaaaacaagaaacacaaacccttaggccttggcacacaagtcacttcagaacgtcactcacttccccggaacttggtcgctgctcggccgaaagtacatcgaactaaatctgacacccttcttgcatcgacatcgcgacagcacacagcgatctccaggcccgcagagctaccgtgcacgcccgaccagcggatccgcccgattggctggatctattttctctattccccgtagcaaaagtattccttcggtgaactctcggcccgcgagctcgagcacgatcgacgtcaatgttcaaacatccctggtgttgtttatggatgacgctggctggctggatgccgaggatgaacgtgcggacagcggtttcgtggaaagtgggtaggacaatgggcctagtagggccgatgtatatatttgagtttgataagggccttgtgtcgtggtatctagatgcttgagtatcatatgttgtttcttggctatcgggtactaacaacctgagagtgtgtgatgatggattgattcggtcattgagaagtggcatgttatctaaatgtgttggatgggccatttacccggatgtttctatcaatttaggatgtaattgtgttggtcatattgaaatagctaaattgaatcaagcatcactgccataaaggtcaaagagcaagaccccactcgttcagtagtaggtttgtcccctcatggccattcgagtctcaggctggaacatcctccgtgtctcatgtcatgccccagcgccttcggaagcttcatagcagcctccacagaggcgatctggacggtccactacccacggctcagatctaaaactataacgacagtctacctacggtagagatctaaataccccgcaggcccatccccgcagtctgtgacgaaaaaggtcactgttctaaccgagatgacatttccaagtgtttactgcgccacaaaaggtctagatcgcatggatatagttgtatctggggtagtctctcgaaggccgctggcatatatacatatatagtaaggcacggttcgttgcataggaagtatccttattctacgaccactctgtcctagttgagagatcaattgtatctgtattcccaatgtgctggttgatgccgagcctacaatgaagtatgtagtgtgtcgtttgaactttaccgtctttgtatcgatagttcaagttagacctttaggtagcataggagtgtctgagcaagctagcgatcaaatacctctcaagtctcagtagaaagactctagtcatagccaaactatgaggatttactgttgctggtaagtgttagagaccaaaaacccgcagaaagtgagtccaaatgcaatgcatgtccatatgtggcttagctcgaaaatcagtgaatgcccgacacgcatcttcctgccactccaacaacgtccatcaaaccccaactagcaaagatcccaccgattccgcaattcagtatggagagaaaactctcatcgccaatggcacccacattcatggtgtccgcaccaggaaaagccattgtcttcggtgaacatgccgcagtgtatggtaaacccgctattgcggcagctatttctctccgatcgtatctcctcgtcactactctctccaaatctcgacgtaccgtccaactgaatttcagggacattggcttaaaccatacgtgggaaattgacgctctgccatggaacgtcttccaccaacctcccaaaagaaggtcgtactactctgttgtcgagtctctcgactcgcaatttctcgaagctattatgccacacgcagaggccgtgtcaaaagacctcccagagaagcagcgaaaaatccatataaaatccgcaaccgccttcctttacctcttcctctccctcagctcctcggcaagccctgggttcatctacactcttagatctactattccaatcggggccggtctaggcagcagcgctagtgtttgtgtctgcttaagcgcagcgctactcctccagatacgcgcccttgcaggaccccaccctgaccagcctcccaaggaagcagcgatacagatcgagcacatcaatcgctgggcattcgtgggcgagatgtgtatacacggagaccctagcggggtagataatacggtctcggcgggtggaaaggccgtgatgttccaaaggaacgcctccggaccaccatccgtcattcgtctcaccaagttcccgaaactacgactccttctcgtcgacacgcaacaacaacggtccaccggtgtgcaagtagaaaaggtcaaaacactcagcaccaaccaccctgaaataacagagataatcctagacggcattggcaaaattgctacttctgcactggatctgatgtctttggctgatgtttctgactctgacgctctcggacactgggggtccttgattgggatgaaccacgggtttttggtttcgctaggagtctcgcatccccgtctagagcgtattcgtgagcttgtggattatgcgaatattggttggacgaaactcaccggtgctggaggcggtggctgtgctatcacgctgttccgaccagataccgaagataaaaccattgaagaactggagcggaagttcactgcagaaggatttcaaacatatgagactatcctaggtgccgacggagttggggtactttggcctgcggtattccgaaatggcactgatggggaggccgaagagattgatcagaatacgttcgaaaatgccgatggcgttcacggtatcgaccagctggttggagtgggagtgcaagaaaatcgggaaggctggaagttttggacgcgagatgtttctccaagatgaaacagagtcatggtcgaccagcttttacctcttgcaagtgtatggtaagctggattggtgtttctctttatttcggggttcattaatgactgtcattggtctcccacatagtggtcgagtcaccaaatttgtaattcaggtccatatgtacatagaataattatagaatacacaaagtaaataaagggcagtaagtcgtagagtcagtatatctagtgcaacaggaaccgcgtaggtgtctcttgcgattcgagctccaacgagactgactttttcctctttccagggcgatagacgagattcttcaatcctttgttgaaattaaggatacacgacacggagttggcgacggtgaaaaccatcaaaaataacgacaaaactgcgaataatgttagggacacccggaaagagttgaaattagtgctctccgcgccgctgtaaattcgaaggaggatgaggataaggaatccaattataacaatcataaagaactagatgactggttagttgcctgaatattacctcgcaatcgagaatccttaccatcatcagtataagcgatttggtcttctcgcgcttgcaaaattgagccgacaggaccagggtcactatcgtgactgggatcaaacaggcattgatgataaaatccatgttttgagcttgaaacacaacaaggaggatttggagttgacttccgaatacgaagaagaaatcgaatttcaggagagtgatataaacctagaagaaatcggtcagtcacaaaacaaagaacatcagcagcatcgcaacaaacctgatatgtaaaataccgacgcttcatctgcaaatccgcactgatgttcttgtatatagaccacgaaaactccgcgcgcaacttccacgtaaaaaaagccatgcacatagtcccgatgcccaaaaacaccgggacaagaatgagctcgacctgatacaatttccgcagacgctcgccgagggcttcatcagccaagctggagatcgtatccttgatctccgtcatctggagaatgccatatgcgaacaggccctgattacagatgcagagaccgaccagctggattgtgttcctccggcgcagcgcgtcatatgacagggccaattcgtatataagcgcaaaaatgtacaggccgaggaatgactgaaggcgcaatcgtccgtttgatatgctgtcgtcgttgaggtcgtcccaaagactcatgagaatccagctaatttccccataagctccatgttaaagaaggggctgatatccgagccgggggggcccctacctttcaattgccactgtcaggaccgtctcggtgatcaccgttgcggagaacgatcgcgtccataatgtgttggggacgtatagtagaggccggctgtggttcggggccttgtgatgttgttcgtcttggttcatgaccggactgagtggtacagaatatgtgcagatgtctgattccttggtcttggaggacttgtcgtaagcatcgtcagatttgggttggaaggtagtttggaaaggcccagagatcatatcaaaattgaggggaatgtggaggttaagcggttcaggctattttcccttttcaggagtttcggtatatcaaaaacatcccaaactaaatacgtctgcctccttcacagtggggcgaccacgtaaggccattttagatcaaagccaaggccgatctagtggtgtcctagttgcaattgacttccactaagctgaaaaacagagaagctacttgtatctttgtatgatgtacaggacttagtcggccgttacacagcctcatgttatttgatagatagccgtgggatattctttacagaataatttttttttaggtattcccccttttgttggtgatatagttagaagggtaagaatattgaaaatatgtgaatcaaaagaagacgcgtatctgggcttgacatgcatgagactaagacataaccttccaggggaaacagcatattgccccatatctgggcaaccttagctcgtgtttcaggtaaactgtactaataatagattgtactaatcacattacgatgtacggggtaaaacatggttacaacataggtacttacatggatctatagcccttggtcaacaatagcacggaatgtctaagtcccttttgtgagaccgggatagaatgtattgtatgagtatgaggatgctaaaataatgcaatgatggggatatatccaaaaagaatgcaacaatgcacgccatgccagtgcttcagccgtattgaactcccaggtgtacccgacaccagtacaaataaaacagaaagaaggagagataacacagcgaagcaaaaaagcatagaaaaaccgcaaaatgcatgattcatgagcacgggcgtgtatgcatcagaaattaggattagaattccatctcgtcatcccagcccagctgcgcgtatatcgatttggattgggatttctcgggagttactggcacaactgcagcacctttgacgggggttcccatgaccgcaggtggggagtgagcgcgaggactctcggcgaccatggcatcaagcgatagagaaaacggcacagcggtgggagtagatatactctgcggtgcctgtcttttgggtggcgtctccatgattgccgaggtgcgagcatgattgagagactggctgaattgtcgagatgatgtcgacaagttttctatgaatgcggacatgtccttagggcgtgaatggttgggggaacctgggactattggttgtgtagatgagcgaggcgctggaaggttgggtaccctgaaaaggcccttgccggaggaggatgatgggcgacgcgcagttatgctatcactctggaaaagtttggaagatggcctagttggagtttcttgaatagctccgtccagatgacttgatcgtggattgtcatgagaattgaaaggatcggagtcagcgccagagaatgagatcgcccgtcgactcgaggacgggatcatggtgggagactcgaaaggagaattttccacaccagcaaatgaccgggatggagccaggctacgaggtagcccgacccccgcgtccttccttcgattgcctcgaggagtcgccatgacctgtacaccttcgccgaacggattgcgcacgggatttcttgacttccttgaaccgctgccacttacaacccgtttcgacgcatcgtctgccagatccttggagacgagctctctgttcggcttccgaagtgcgttaatagcagcatccagctctttcttctggttggccagcatttggacctttctcaatttagtctcatgctgtcgtgctacggcgttaagatcaacctcgcggttttcggtgcgttttgctttctgaatgccaccccggacactgccgctgagaacagtgggcagcaagggttcaatatcgtgcttcgcattatgctgggtcggcgcagtgttggatcgagtcagtcctgggtgccgagcataggacgctgccgctttatcgtccgtaagtactcgctgtaatgtccgtcggggcttcggtgcaggctgttgtcgcttgacttcccccccgggttccacacggcgtgatttactcgaagattgtgtctttttagcagccgaggaaatactgccggataccccgaatttgcgggtgatcagcttgcatttgtccgggagacgcgcagcatagaatggaatgatgacttctgtgcagaagtcacgcaccgcatcgctctcgactttcttgcctgaaagatggttgctactgaaagaagaagcctttgctgtatcggcggccgatgtttcttccattgtcacagcgtgccaaatacacatccgatcgagatggagttcaagaagcatgttcaaatccgttggcttcttaggcttggctttcttcggcgtatcttgcgccccatttacatctttctccttgttagtgctggaagcaatggtgatttccaaccccatgacttccaaaatcagcaggatctgcaattgtgtctcgcggaggcggagatccgaaatctgtttcttagactctgcttcacgcgacgtttcctgtgcaggatattcattcaagattctgtccttccaccacttgtggatgaatccttcctcccctgggtaaaggccattcttccccatcttctttttcttacttttccgcttcttagattttgcgccatcatcagaaagcgcaagagctgcatcgcgaattgccaggggcaatgtttctctgtatttgaggtccattttcttcgtagcgaggatagcctcgcgataggattcgatcaactccgtcgagccatgaggctgttccaagtcacgagcctggaaagcagtccgacagcgtgttaacgggcccttcgcaaagtacgccacagaagtctagaaaatgtcagccgggcaaactcctaatatcgagtagagcaaatcacctttgaaacgtagagagcctgcagatagtgctctctcatcccgtccagccactcctcaggcgactgttgcacatccacaacattggaatcgacaccatcagcatccatagccgcaggtaaatcccccaagccctgaggttcaggaagcaagaaagagcccccttcaacggcatcaaaactcctcgacggagcaagcgaatggctccggtgctctccatcacccacaaaggatgcctcggtatccccgaggtccgactcagacggaccaaagacaaccgcaatatccagcccagcagacctttcactcacctcatcgtcggagaagggctcatcgatctgagcagcctgccaccagtcaaacccatcgggaatagccccggtctcatcgacagcaacgctatctatatccgcagcatcagttccatgccatcccttggccgcaacaactagattgccctcgtgcacccatcgggcgagcttggagagcgagtatattcctctcttcaccctctcaataatgtacaggccaccattgggcactaggcgcactgcgaggacgatcggttccgtctttacgcacaagtcaatttctaacgaggggatgtccgcggtgaaaaggccgccggattgatcgtcggatcgggatgcaggcgtatcgtcgagccacgagaggggcagccttgtgcgggggagggccgtaattggttcgaggatcaagggttcatcagataaagacgccgagtgagcctatacaagttgcggagagtgagcaatagcaaccaatggattgagcgtatgctgagccagttgtaagcatgactcactctaatgacgatggaagaggtagcaagccgtctagaagtatcatctagcagtacttgatcgtctcttttcctcttctttataggtggaggggtcggttcgtggagtttgttcagcgcggatgaactgagcggatctaggacgttggggacaatgcgcgaggccatggtcgcgtctaggaaattgtgggcattctgtaatttgaacgcaagagtcaagtcttatgctaaagcaacaaagcaattgatgttggttgtgcaggtgtcgacaagatcgcgctcgaatcttggcggatctggcgtcacgcgtcgggacgtgtactccgcctggaccaatatgagacacgttaattgatttcgctgaactggtcgactgtttggcctgaaaagaatttcgcctaggtttgagattactttcttacaagatcgagtacgttaagaatacctaaactagtggtatgatagcaagaacaatgtgaaaaaaatgggatgaaatattatgaatctatcgctaatgtttagattagcaggcccaggaccagacgaaagaacttcaggtactctcacagagtagtgtgcagttccctcgaaaccgagagggcatgatcccgcgtggaagcaggaccaaaatctcctcggtaggtaccatggacagtgaggtagagatacggtgttgaagactgtcgctccagaaaaacgccaaaaacttcctttcccagccgatgaaaagtggtatcatgttgaattttgtcttcgccgaaaaggcccgtcatttgcgcgaccatgcagataatgaaacaagagaaattggtctcctagtgggaaccaacttccggattttatgagggttttttatagtctatgctcatcgtgcttcgagttgttgaaaacaaagcaaatcatcacagtcgtcaataattgtccggagtcaccggatcaagcagagcccgcttagaacttgagggtacggggtgactcccaggagaactcctggttagtgaagtggccgttcttggcggtctggtagtagatgggcttggccaagtcgaggtccttcacgatgacaccgggacggagatcaaagttgtcacggatgatctggaccagctcgtcggaggtcttggaggaagtaccgtaggtctcaacgaagatggagaggggctcagcgacaccaatggcgtaggagagctggacgagggcacggcgggcaagcttggcgttgaccaaagacttggcgatccagcgcgcaacgtaggcggcggaacgatcgaccttggagtaatcctttccggagaaagcaccaccaccgtgggcaccccagccaccgtaggtgtcgacgatgatcttacggccagtgagaccggcatcaccctgaggaccaccgatgacaaagcgaccggagggctggatgtggtagacagtgcgatcatcgaggagctcggcggggatgaccttctgaacaatcttctccttaatggtggcacggagctcctcagtggagacatcgtcagtgtgctgggcggagacgacgacagtgtcgacgcgcagaggcttgacggcaccgttgtcgtgggcatactcaatggtaacctgggtcttggtatcggggagcaaccaggggatggagccatcctgacgggcggccttcatggcagcattaagcttgtgggcgaggaggacagtcaagggcagaagctcaggggtctcgtcggtggcatagccgaacatgataccctggtcaccggcaccgagcttctcaagggcctcctcgtagtgaagaccctgagcgatatcgggagactgctgctcaatggcaaccaagacgttacaggtcttgtagtcgaagcccttctcggaggcatcgtaaccgatgtccttgatagcgccacggataatcttctggtagtccaggtgggctttggtggtaatctcaccgaagaccatgatcatacctaatgtgacacgtcagattgagatctggcctgaagtaattatagtgaacctaccggtcttggtggccgtctcgcaagcgaccttggagaggggatcctcagcaaggcaggcatcgaggatagcatcggaaacctgatcactattggggaattaatacactgttacaattggaattgatggtacagagcccatctaataatccactgagggcaaaggtgaaaggttttaggggtataactcacgcaatcttatcggggtgaccctcaccgacagactcggaagtgaagaggaaagtgccgctgtttgcaactgaacccattgtgacggtgtgtggaagaaacagaaaattgacagaaaaggaggcgggggaggaatgaggaatggagagaggagagggaaagggagaaagatatctcggggagggggaaccttggtggggttttgcttttttttccgagttacacaggcggtacccgagaaaacatagtgtgcgtgggcgaaaggcaaggtactgccgaagtaccctctgaatgtcctccgtacacggtacttcctgtcccttgctagcccgcgatcgcgccatctggggcggtgaatatgggcagatcgtctggactgcaattttcttatgacgataagatagaacattctaaagttgaatcttcttggtactttttaacatacaaccatgtccaaatttggtgtcctggtaatgggccctgcgggtgcaggcaagaccaccttcagcaatgcaataatccaacaccttcaaaccacccgccgcagctgtttctacgtgaacctcgaccctgccaacgagacattcgcctacgaaccagatctcgatattcgtgacctgatcactttggaagatgtcatggaagagatgggcctggggccaaacggaggcctcatatactgcttcgagttcctactccagaacctggaattcttatcagaggcattggagccattgagtgaagagtatctgatcatcttcgatatgcccggacaaatcgaactgtacacacacattcccctgctaccaaccctcacaactttcctctcgcgacagggcccgttgaatatcaacatgtgtgctgcctatctactcgaaagcacattcgtcatcgacaaggccaaattcttcgccggtacactcagcgccatgtccgccatgctgatgatggagatgccgcacgttaatattctcagcaagatggaccaaatccgcgatatggtgacgcgccgggaattgaagcgctttaccaacgtggatgtggaattgctgcaagagaaggaggaggacgatctcaccgcaggtgccaacccaatggccgcggaatccttgatgagcggcgggtctttcaagcagctcaaccgagccgtcggacagttgatagatgatttcagtatggtttcgttcctgcaattggatgtttcggatgaggacagcgtcgcggcgatagtgagccacatcgacaatgctatccagtaccatgaggcccaggaaccgagagaacccaaggatgcagtcgaggtggattatgaggattgagggatatcacatatgattactgcatcactgtgacttgcagcgaattctctgcatatacacccccacgaccgaccactctacccaatgccactccctgcagcagcctcgagttttcggcagcggagcagtctgagataaagcgcacttttcatctccgtttgctaatgtacggtcttacgatattggaaaagctttctaacgttcttgtcgcgccggactccacagaatttggggcttcctcgacgtttggaatcaataatacttacgataaaatcatggctgcgactactagagtcagagccaagggctttctacaccacaaatggatattcggtcatatcctcgggtaatagaaatcataatgaaaccaagatgagactaaaatcaatccatgaatatcgtgctctttagaattccaaaaacaagtcgttaatcgctagcccaactcaacgggatgaagtaaagaataggcagacccatcgcgcagtttcatgatataccccaaacagggataccagccgcaaagaaagacatcaacaagccgagaatttcgactcaattcccagcacacaactattccaatctcaccacacgtccacatccaatcccaccgaaaaacctcatccaacagccctataacagaccaaagcaaaccgaagtaccctacctcgggactcccgcataagccgccgcagccatcttagtcttttcctcaaaatcgccgacaaacccacatatcagaccccaaacccacccgacacccctgcccgcattctcaataccaacgttgtagacataccagccaagacctagaaccgagacccagaaaaccagcttgaaagcgagcgcgatccagaacatgacaaggcggtaggcgtagtcgaggatcttgatagagatgaggattatgacggcgaggaggaataaggacattaggtctggcatgacggaggcgtagacggcgaggaacttcgagacgggttcgattatgtatggttgaagcaccattgtccgtaggtgcgagagttttgttgcgagatggtcttgtgctgttgcttggaggtaggcgaatgtcgaatgatggaggactgtttggaggttttctgtgtccgggattattggttagcttttgcggtgtgggatttgtatctatatggctggaaggcaggttaagtaaatacctggtagcaagtccatgatcgcgtattggagtatatttgattgttgaagaggtcaacgagggagagacaggggcagagagagaaagagagaggttcctcgcgtgtcaggtccgtgtttttctttggcttgccgcgctttgtttgagaacctcggctcttggtgacccttgagaatggattttcgagggaatactggtgtgaggcagaggaataacaccctggctttccaacgttcaaaggcgttgtttctttccaaggttgactcgagagcgcttcgtaaggtcttgtgctggagctctttgtttgtagtagagcaatgcgaggtggagggtacgtgaggtgtgttaaaggtcagctgcagcggagactaggagatgttatttctgaaggtatatattccgatgcaatcaatgatgaatggtaggccaagaagcgaatgcgatgtttaagcttgggtgtctaagttgtggcacccagaggatgcaaaccaaacaaacttcacatgtgaagagatgctctactccgtacggagcacaacatacttggatctatagcttcacttatacattgctctcagctaatctcggtatgtttcatgaatattagattcattataaatgatactgtacagtagattagatatttacctgaaaagagacgctttctatatacaagcgcgaccaacaacagtcaaccacgagttcgtgaatgtaaaagacaaaacgctccaagcccaaattggtgaagaggccagcgcggtgccacgcgcatgatctaagatgaaccaaaataaaaacccgggactccgggctaactccaatatattgtactctaccatcgcgggcgatgggagcacaaatgcatatgcagacatggtatagtaagacagtaggaaagggcaaagcgcgagatttgacaaatttacagagcatcgatgagccctctgagggcgtcacgctcagcttggatctcggcaaggagttggcgggtttggcggagagcgtcatctctgccggatgagttagtaaagatgggatgaaaagagataaccatgagataaaacacaagttacatacctgtcagtttgaagctgagccacatcgatctgcgtgcggttcatacgtccaaccacttgctccatctccatatccgcatcacggaggagcttctcgagatccttgactcgtcgctcgaggatttcggattggacaacctgggtcaagggtacaccctcaccgctggtggtctggtccaggcgcggcgagcgagcatcgaatggtgcgttgggcggccgcggggagaggacaagtgtgttacggccgccattcatcatccgagtgagctgcgcatgctggctttccttcagcaaacggagctcgtcctcatgcttgcccatctcttcttccgtgtggttttgggcaaccaaaagaacttcctccagctctctcatgtggttctgcagaatgttgatccgttcaacggagagctgctgatctttgtcacctttatcaatggctgttgctagacgggaatgcagagaagtattggtctgaagctggtaatggactttgctgcccagtgtctcaattcgaataagggaggaagcgagctcctccgaatccgcaacacctgccttagcctccgcttgatctgcttgcaatttctggaatgcagattgcagggaagatgatgtggtcgcgacctcagcaaagccttcttggccggtcatcaactctgcaccagcggcagtgtcctccacaagaagagcgcgcagagagctggtctcctgctcggcacggtccaagtccatcttgagaccagcgaggttcttctcgcattgccacttgccatctagagcatcctcagcgcgcatgcgaagatgattcacctcgtcacgcaggttgcgcacatctctctcatagcctaatttccgtggctgacccgattgctgcgctcgagcaagctccatctcgagcagacgagtgcgcttctcgtactcgcgggcctggtatgcctggcgatcgaggaggctccgcaatgtccggtggaggacatcgcgttgaacctcgatatcgtggaccttgtcaaccaatgattcacgtgtttctggtgatttaccaccgctgttattattcacggagttggatcgagaaagtccacctgagtgagctaagctgctgggcttgcgtgcaacggagctcgatcgtctcactccaaatgccgagtttctgggtgaggccccttcctcagcgattgaagcgaatcgaccaccctgtagctgagccaaagaagcattctcgatttttaaagcttcaatttcctcaatgagcctgttgtcatctcgaagttgatctcgatcatttcgcaattgttccaactctacccgcatggcagtaagtaggtcctcaaagttatctttggattgccgctcttcaagcagcttccgcttggtgttttccaatgcggtctcgagttccttggttttcgacgacaaatcagacgtatccgttctgtcgcgtcgaagctaatgaaggttagcagttggtcacatttgcgccatagtttgtcagccgtacctgttgaacttgagattccaagatttgaacatgcgattctgatgccaagcgctgagaccgctcctcctgtaacttctgcgataattcgaccttgagttgtgctcgttcttggtctgcagctcggcgaatcttttcgatatcttcgctcttcccagcatctgatgcatagcgaacagagctattacccgagtctgagaaatagtcacttgtccgtcgattgatgtccggaccttctaattgtagccgttcgactagatcctccagatccatttcccggcggatagatctcgctagttcggagcttatctctcgtaattcattctcaatgtctgcgatcttggatataaatatattttcctttaaacttgaagaccccattgaggtccgcgctggatgaccatatccattggtcttgggatcgtatggagagccggggttgaaaggaacgtttgctaatggtggcatagggaaatgtgttgctgatcgaccggagtcggagatctcggtgctcgatgattcacctccgggagatgtattattccccttccagccgaagaaggagctgatcttgttcccaggggttctggggttccttggatctcccgcacccattgacattgataccgcacgcgagtctactttgaaatgtagtggaggtggtctgttcatagacatgtgtaatgccatactcgttgcccgtcgtgacgatcgtttcgttagaggaggggatctgaggatcgggatgaatggttcgctatctagacgactgtgcagaggggttccattcatgaactgatgttcgtactcttcgtcaaagtagttggaaccctcgtcttcgtcgtcgtcgtcgtcgtcgtcgtcctcaagcaccgatcttaagtacgaggcggaaccgtggcgggatgcagcggtatcgatgtataggggttgagaatcgttccgtcctcgcgaatatctagagagttgggacagaggcacgcgattagtcttccagactttggagaaacggaatagcatgtgtaggccatatcatgcttgatcggtaggtagcccgggggagaaaaaaggagggtctgccgaaaaacgcgggagaggaaaaaccggggtcatgctggtcgcgtacctattagagttctttggcaccgatatatatgagtctccatccaccgacaaaggggagagtggtgcagtgggaatcgaaatgggtttatctccctcgaacgaaatgggagaggagggatgatcagggcccgaagtcactggaccatcattatgcgggagaggtttcgttcggactggaggagtagttggaggggggttaggactagagaagctctctgaatgggcgggagagccgccaaactctagaggagacgccatgaaacaccctggtccgtatcaaaaaatagccatggatcgacagccgttcatgctgataagcacgggaaagagaatggcaagcgccaatgagacgaccaaaagggtaaggattattctaagaggatatcagacgagaagggaaatgggagaaaaggagaaagtcttggtacacgacaaccccgggcgattggcgcaaaccgcccgtgggttctccatttcagtagcgctggcttcgggacgagtaagcgtgggtggagcacaaggggggctggcgtgggtctggatgtgcatcaattcaattggtacgaatatcatacaatgatgctttggccgataggatcgacatcgcttgagaacctacttcgtatgtaccatgcagcgtggcgatacgcttgacgtccttgatagtccggacctggtaagatgtgtataatatacaatgtactctgtacggagtatatgttgtatagtactatatggagcacggtgataaggtttgaaatatgaaaatagaacattcaatagtgtcaagtgacacaaagaacccccttgagtcgtggagaggagaggagagggagaggttagcccgggtgaatgcttggcgattcaggggtagcctttcagggctgtgggaagtaccgggaatgtacttttatgtcactttccttatctttctcttgaaaagatacctccaagtactttacgtctactttgatgtttgacttggtagccctatacaatctactcagtaactactctgcgtatctgaagttttcactattaggaggctacatttatattagagttgtgtatttcatacggcttgtatataacttcaacggactatggaaactcaatataattgtctgcagtatattaaggggccctccgaagacagtggagataccccttttccccttccctctctcgtacaagcttctcaattttgtggaaaacccaaggccataccctgccagaagaacgtgcacaatccaacacgctaactacggtatgtccaatcaaagtgagacgtcgatcaacacagcgtctcgccagacactcgggccagcgcgtggggccggaatgtgttgcttcaacgggctaagcgcccggcctaaagcacctgttcctgcatcgtgtcacatcaggaagttggccaatgtgattattgtactttgtttggaagaccccgtacggagtccagtccaccgatatgagggttagcactgaagaccccacctagaaagacattactacttactgcaattcatatggattctttccgcggctggaattgattggacaaccatatgttccttgcttcagcttaggacccaaggatccaactctactgtctacatacaacatacaatcccccgtgttgtgaataacggcctagcagtaatcacacactactcttatttgacgttagggccgagaatacggagtactattaggttatacaattattgtgtcaaccccttatcgatctacagggtttattcagggcgttgatgcgactgctcggactcgctctttgttacaccctaaggagataattgtttcactggtacaatatgtggtaacattgaaattagactaaatgttaccatcccgacaaatggaaatatttatatgaggtggcttgatctattgtatgaaattaagggttctaagatgcgtacaacatagggctactccaggggtccaccatagctgtcacagactgagttgacaggacggaggatgtaccatacggagtacggagtacacagcgctaaactgttgtctcagtccacctgcacgtcaaagaaaagttggcttatgcacacccgtttgatccactcccttccagtctagaccatgtctcaacctttgaagctgtctcacattcaaatacttaaatcccagccactgctgttctatcattagaagtagttgggagtgtccgggtccaacggctggctagatgtctcgatgctgcatttacgctgtttcaggggcccttgctgtatgcacatctctagatatgcaacatattggatgcaatatctggcacgtacgcattataggtatggcggtgagcaaacctcggcctcggcgcttccctttaaaatccttcgtgctccctctctttgatcactaattcagactcgtcgcattttccagcttcatccacagtggttgagcattcgacaaggtttgtgcatacggctggacccactgcagacaaaggcgatgggattatcctagccacctcaaaggttttttatggggcatctgttcgccggttctgatgatctggaggatcccgacgagggctcaagcaaaatttacagtcaaaacacttaactaactggcatcctaacaccgatatactcgttctgaaagttcccctgtgaagacattggattgcgtcgaatgatctaaatcaattcgaaaggctaatgcttcacatcgacgaccacaagcactgccgttcgatcattgagagtgagattcatacaacgtgatgatgaactgggcggggtttgaactgttataaggtcttctaagtctattccaccattggtgttcgacacttagtgtgtccttattactatccgtactaattatttttgccctgtgagctaagagaccagtaaacagtaagatataattcaagggcaaaatatcggtaatattatagtagcccaatgctaactactagtaactactggtcccatttactctgtgagcctgcgaccatgtcattcgacaatttcaacatcgagggcaacatgaacaccacgaacatacctttcgccgtgaagcgaggcagtaaattgccatagttgatcgacaagctaaacgaaaagagattaatacggcatttcaaaggcgactagacgttcatggaaattccaccgaccgcggaaagctctcttgaaatccgacctaggagagttagtcttcaagcatctcgagatgaaggcatctagctgacttgcgattatccaccgcttgcttgctcgttccaatgattcagttaccggttgcaatacctcggtcatgtggttgaaatgcttttccagccaggcagctaccgttccagccttctgaagtaaaaagacggccgccaaaggcattttgcttatgctgagaatgtcgtccatacatgtaatgtcacgagtgatgttcaacgccatttctagagctgctatagacgactcccggacattattctgtctgcctgggacgctaccaaggcacatcagccgcttcttatgaagttcaatgagagctctacttccattagcattaaagaaagatatgaccaaggggtgactcacagaagaaggataattatcgctctgtatggtcgctcccaatcctttccagagctattcaaaacgtcgaccgtatgttttcgaatcaatgactcaattctccagaaatcatagtctgtcatttccatcatggagacgggatgaatctcggttaattgtacgacttgctccagaaaatagacagcctctatctgctgagcaaaacctggaatggttgttcccattgcgtcagagagcagctttatttccggatcccagggaccaaccccagtatgattgctccatagctcatcatcaacaggaagttcatgcccgctctgagagctctgaacgagcaaggttcgtccagaactctcatcaaagtgatagaagagtctgtcgagcaagtaaatcgaccaccacacacgcttcctctcttcttcaaaaacagaggagttctggcggagccgatgcaacccagtagcgaatcccaaattgacacagcaagatagcgttgtatatgaatcagagtgcaatccacttccttgctcatatatagctagcagtaatcctgactgcatagtggctaaatgatcttgtcgatatgtatgtaggagcgagaaaatctttttgcataccacatataggggtatgatttcagtaagctgagacagttctgggacatttggcggattcaccagcaaaatatggagaataagggaagccaactcggcacagggctcatctcgcagtgatgcaactctttgtgccaagaagatgggatgaataaagggaagccattggtgcatgcatcgttcgtagcaacctataacattttctaatcgaagattcaggcttgccaagatgtcaaacatgtaggaagtgaaaccaatgtcgatgctcttcttcctgcaggtgccgatgtagggttgatcaaggtagtaaagtgatttgtgaataactaagctccaatggtcatgatcttgagtgcaagtgataggttgtagaggctgatggctaggattttcctgagtagcacaagatgtgtactgacatggaacgttattgcttcgccaatttagccaattgctccgaacaaggttgaatccattatttacctgacacaacggctgcagcccggaatttgccgatcacatttgcgtttctgagaatgacacaagaaacaggcgtttggagcagcactgcctacttgcataatagcaaaaatactcttgaatgggcgggagcttaaggagcgtggattcatgaaaacgccagtaagtagtggataatagtttggcctattagggacaagtacaatataaagcggtgagagcaatactggcagaaccagactcttgttgcgctagtccgctagtgtcggactagcttcccttggcaaatgaagtatgtgatgggctatattgtatgaatccttcaatattatacaattccctaggtcccttaggctgcttatcaatttcaatcataaatctcagtgtggtactcggtgttcggtgttcggtcttattaaaagacaatagatcgtcagctataagtatgctcgctactccgtatacgcccattagttctttgccaaacctcatcatcggatttcccaaactttgcctacccccaagaaacatgagtgtttccgacgtgccttgtgctccatcccttttcatatcccacggtacagggccgtttccgctcttggaccccgaacaggaatcctacagacaactcctccgccgtcacggaagcaagctcgacggtgtcaagggaatcctccttttttcggctcattgggagaccgagactccgcatatatcgggtggcgataatcctggtatcttctacgattatgaagatatgcgggataggctcccgccggcggcgtttgaattccaatatccggcacctggaaatgcgaagttggctacagaagttgccaaccgactgaaagaatgtggatttagtcctactttggatcttcagcgtggatttgaccatgctgtctacgtcccaatgatccttctacgaccgcaggccgatatcccaatcgtccagatgtccattctgaaaggacacgatgaacaagattcaacagagaagaacatcaagctgggacaggcagtggagtgtttccggaatgccggctacgccattgttgggagcggcgggtcgtaccatgacttcgaggctatcgcaaaggcattctttacaaatgagcctgtgccagcaggcacggaacgattcgaaaattttttgaagaatgcggcatccattcctgattcttcccagagagaagtggcgcttcttggatggagggaactccctgctagtcatactgctcatttgaccaactgttcagagcatctaatgcctttcatggttgcggcgggaagtggaggggacattgccggagtgagatttgatatgtatgagtacaagggagctccaatgagtttttataggtggtaaaggaggtcactcagtctgaaggtcgaccttcagacgaagtgtcattcttgtgtaatcacttcttgttacctataggaattatgaatttcgccttttcattaataatctctgtattttgtttccatacacgctgatcgatttttgatctggctagttgcgaagcattgcatgatagctcattcactcccttgggcactttccattatcagcgccctactgtgtggattgaatacatggaggtactacctggatacgacggctaaagacagagacattgcagatagctacatgtatttcttatgacaaacacttctatcctttctcacctccttcccgaattccatccatgaacctattcctctattgattgctcttcccacgaagtacaggcttatactcattttcaatgaaaataaagtgcgcaaggcccgaacttcgatttggatgataacggaaatgccacatggatattcccctccttcggtcagtgaccctcccgcagctgcccctcaccgagctaaactacggcagcgtggcacttacttgccgaggaacactagattagccacgttcatgattgacatgaagagccaaatcaagacggctagaatcattgtgtaccacgagttggtcatcttgacaccttcgggttcgagctcggctccctctccaattacctggtccgcatcgctctcgtcatccctgcccgccatgcgccagcgcgctttgccgggataggccgtcatgtatttatcgcggcaggtaaagtagatcagcggcgcggtaacaaatggaagtatgatactcagcgctacttgcgacccattgagtgctgcattaagcccttcgcgacccacggctcccgcgatgacgatgctcggtgtgatactgatggtgcgggttatgaggcggcgtagccacggcttcatcttccagttcagcgcgccctcgctgaccatctggccggcgatggtgcagacgattcctgctgatactcccgacagcaacaatgccagagcgaatatgatacctgccgcgggcgaaatggacttggaaagcagatcgtgaataccaaagatgtcggcctcgagggcaagtgggttttgatatagcgcggcaccagcaacgatgagaatggcggagttgacaaagagggcgaacgtgaagagcgaaatggccagctcgagaatcgatactgtcagcgagtgcttaattgcgcctaaggacgggacatagtagccgttgtcgataccatcatctagaacggtatatcccgacgcgagctgacgaggcaaaagcctacttcgctcatcgtattcgcgtaggcggggttgaacaattcccgaccctaggtacagactgtgaggcatgactgttgcgccaagaattccacaggcctgatagatactggaaaagcatgagagtgagataaggggacagcggggaattttggactcacgcttccgactcgatgagatattttgacggaatataacccttgaaaacctcccccggggtagcgccatggatcatagacatttggatgcaaaaacacacgaccacggcgagaaccaagcaaatgataaacatttcaaagtaccgtagacccttcatagacccttccgggtggtagaaaaacagggttaccatgacatcgaggatggaaatagcgcatcctgcgaccagcggtaccttagggatcagaaggttcaatgcaatggcaaatccaatcacctggtcagttagcacttgtagacgcacaatatacaaaacggggagtgaatcaggggtctacctctgctatatcggtggcaataatggcagcctcggcaaaggcgtacaggatgtagttgagccagcgcgggagaaacgcgcgacatgcctcggcgaggttcagaccactgacggtgccgagcttgattgccaggctctggaggaaaatagcaaacaagttggacaggagaacgatgaacaatagacggaagcggtacgaggctcctgcggcaatgtcggtcgagtaattgcccggatcaactaggtgcaggcatgtaagtgaggtgaaggggaaggttgcgggacgacagcattctggacatactgtacgcaaccgaaatcataaagcccggcccgatgaaggagccaaaggtagcgagcatcttccgggcgcgctggatcagcgtgcccgggtcggcgtcaccaccagctgaagctggaggagaacccgaggggtgggcggctgcaggtgtctgcagaccaccctcagtggactggccgcgatcaattgatcgctgagccagccggtaggtggccttgccgtggccgtcgctttcggtaggagcatcactggctatttgacctgggacattcgaggccgcatttgacactgcgttagtgtcgctttctcgaacggcccgaatgttgacgaggccgttgaagtcctcgttggtggtcaggtcactggagtttgggttcgggctttggttgtagccgtcaccctcgaggggctcctcggtgtgggatgtcttgttcattccgttgacaactgccgcagaatatgacttgttggtctacgattgataatacttgagacggggtgtcggatgaatgttggggagacgcggaaataaaatttatggctccagcggtactccgtataggcagcagaaaaaggaacccgaatgaagttttccccccacagcggctggtttgtaccgactttccccggagggtggattgatctccgattttgtttctcttctattctttctgagccctatttttagaggcacctagctcaatacagtcaatggagacagacagcaccagaagatagccgggattacttcggtgtcagactccatgcccgacatttcgtgcccaattgggattataccctcgcgcaaccccaaatacattccgtatctcatattccccatttgtgctttcatagtgggtgaatccggctagacaaccaaggatgacatggaagaagccggtgatgacaccgtaaacagccccagctgcggcagcaacactgtaagggcagacatcgtagcctgcaggttcaagttaagtattagttaaatcattcaaccgatccaacaggagcagcgaagagagcgaccccgaagctttcatgatgtaggagagacggcaacgaacctccgttatgtgccatacgagcaaagacgtatcctcccaaggcattgaaccccataacacaaagttgtgtctgaggtttgccaccatatagccccccagccgctgaaggacaggaaaagattagcaacggagctgcaagcgaggagaaaagacttacattgatatatccccatacattctcccgagaggggaatagcagcgacaacagccgcaataagcaatgcgcttggtgctatatatcgttagtacaatgactagatgggtcatgataatgaccgccaacgtgagccgcacagagctctagctgaacagtgcttcagtggacgggtttccactcactttctccaagaaccaaattgctaatctccgccgtgaccaggacacaagttccaaagccacttgccaccagagccaacagtatccacgcgggcgttggcaagcccgcgtaccctgcgaattcgataaatgctaacacccctgatttagtgactccagcgagcgcaccgagttgtagtgctctcgctgtcagtgggctcccattgacatgcgcggcggtcgccactgcagctggaccggcggcagcgtttactgcaatgtctagcacagccaaggcgaagaacgtccatactagagtaagggacatggtaagtattgagtggaggcatgatgaagtcacatgtaggaagtcattctgatttcctctgggtccaaaacatgacacttactgttaatagcaggatgattgagctcgtccatatccatggtgagaattgtcagaaaaaaccagattcatatactgaaatagaagcagtaacgattcacacaagtcaagatatatgcctggagaacagaatgagagtggatgtcttataagaaaatccaacttcttagccaagacctgatagataggcaagctcccccattcctcgctgccaaaagcctcgcggggtcatgtgaatgatgttataagaggctgaaaagttttaggtcccgtctctcaccgaaacaggtatatcacgaagcattaaacgaagggctgcagtaatttgatgatacaattccagattgaccaatcaagaggctcatttgccgaaactaagtccctggcgttcccaatgagtcctagcggttcctgcagtaagccgtgcgggcaccccatggggcatccgaaggcgacccaatcccagtgcgactaagaacatcttggtgggctcagccgctgccttcccgtattcaatcccttgaagaatgatgatttgggctggtcatcgcaggagttcgtggcgcagggctactgcttagccacctacgtgtccgggcaaatgcttttttcctttttctcactctttcgtcatgcacagcgagagagactcgaagaacgtgaaagcgataatgtatgcttgaaccgagactaagatatagagcgtctcccccctccgctcagatcgtttcgcttgaataatcattgcaacgatctttgtgtgccacccaggatgagttcaacagcatgtatcatccaggctaaccccgatgtatctggggccggagtaagtcatttctcatgccgtcattctcctccatttagctcctaccgtgagcaaaagaacacccagctaaaccatcacctgcagatccgtatatcgatttacaccctctgcctaggcgggtcgatcgttagctatctactccgcgtatttgccccaggcgaagaccaagaagagttctcgcgaggcgtgtgctccgccctcggcttgcaaggcctagccctcctctgcacagcgatttaccagacagtgcggggcgacctaacactcttccacgcgatatgtgtcgtgcaccttctcgccatacttggcatggatttggtgagcaaaggccggtatgaaggtctcggtccatggcggctatatttcttctccgccatccagattttggttttggcggctttcctcgctttgaatgtctatgtttgggtgacggcgccgcaatttggcagccagcccctgtgcaacaaggacacggtttatgtggtctttggagttagcatcaaagctacgtctcccgtattccggtatatcattctcggaacattgggtgcggttgtagctggctatgctcttgttttcacttgtatcttaccgtgtctgtgtgggtacgctgcgtaccgaagacggcatcccgacgctggaaacaggattgagggccagaagagaggctggatgaattggtttatggaggttaatcatcctatttaccaggatcatcccgagccacccgagaggctgcatggccaggcgctgctcaactttacgctgaacaaggtcgcgtattgttcgttctgcatatacttgattgtgtcgctggagcagactatccatcggaataacctcgaccccgaagagaaaggatggacgtttggacaggttattgcgattttcttgttgttaggtgtcgccaatgagctgctcaatgttcttattgcgagttgggataggaggcaggctgaaggtgctcagcagctggtgcaatttaggccgggtactgggaactcggtgcattcctcatcttcttgatatgttcatgtccgttacaccgccgtgcaacaagacgctcataatattgctgatatctgaaagatcatgaagccacgttttggatcatacgagtgtttcttagcaattgccgtgagctccgatctcgcctgtaactttaaattgccatggtcagtatacaagaggtgaatatttgtgtcaccacatactcctaaggtggaagcctgctgctcaatgatgccaacggaaggttgttaaggctagaattcgaatgtgctgaggtcgaagtgaccccggccccgggcagttattcttaaaagggaaggcgcgctgtgatgcagagccaattcgttgtatgacatcgactaatttgtgcaggacacgatatatattctatttacaaacccgagggtgtcaatccaaagatgaaagatcccaaccaagaagcgtccacctggcggctcactaaatgttaaacatctaaccagtttgcgctcatttcatagtactgtcaactagctcgcggtatatcttcttgagatcggcaatatcagcgttaagttcgtcaacctgctcgctcttctcacccagcatctcaagagtggtctggtagcgctgatcaaggtcttcaagttcagcttcgagctcctccacgcgggaatacgagagctgcttctcttcgagctcacgcataaggtccacaacctgttgccgggcctcgtcgcgctgggtcgtcacgcgggccagctcgtccttggagccggcgcgctcgctctctaggcggcggaccgtggcactcatgcgctcgaccagctgcacagaagggcccgcgccgacagttgactcggaaattatgtcgttgataccgcgggatggaggtgcatgggtgccgccgtacgccgaaggagtgacaggagtgccagattcaaaatactcctccggctcaaaggtgatggagggcgctgccatgaatgacggattggtgttgatgtgtgggggagagagcgtggcttgggtgattgaagcagggtaggagttttggcgaggcggcgtaccaatttccggtgaggtgaaagccatagtagatgagcgccggctaggagggcggaagtccgatggccctggggtcatggcggcgtcgagagtgctcgaacgccgtaaagatgcaacaggtgatactccgcgtagttgcgacggggaattcacttgctctctccacttggcccgctcctcctcgagcttctgcgcccaagttgagtcgcatgttttcttctgctcggccatgtccttttgcgttgaggcgagggcctctgtcgctttctcgagtttgtgttgcagcttctgcagctcttccatgcgttcctcgagcttgctgctcaaatcgtgctcggcttctttggcgttatctagttcctcttcgaacttctttaatttctggttctacggtgatgtcggttagtcccgtgttacaccaatgcatggaactttgtcttaccatctctcgaatcttcttgcgaaggtcagcctcacgtcgcccagcatcatcgcgttctttctctacgctagccagacgtgatagcaaagatccttctagtgtatgccaatttccacttgcagcagcatattgtgtttgcaaggtctcgatctgacggagaagtttggcttgggtctctccagttgcccccgatgaagcttcctctgcgcgggagcgaagagtttccatcttactttccaagacagactgttcgcctttcaattcagcctcgagcattcgggccctctctttctcttgctccaccttctccttcaactcagtaatttccctcttggatttctcttcagtgatgtcgcgctcgatcttcaaattgcatagctcctcgtctagttctgtcgcccgctgcctctccagctctagagcgtcagaattcgcttttgtctcggcggtttcggcacgggaaacggcccgactcaattgcgatttcatctcttgcacagtctggctgagcgcattgcgttcattggtaacagcttctaagtccttagtcgacttggtctgagatgacaaagactcggttgccctcttctctgcggcctctgcccgcttggctcttgcttcggagttgactaagtctcgctcaagcttgtccgtctttctcttcatttcaatctgagatttggtgttttcagtaagttgctggcgcaatttcttgattaccgttcggtggtccatttccgacttagacagcttctgcccttcctctagaagcaatgcgatcttctcatctttctctaggagttgtttttgcgcactccccggggtagcatttgctgctgcatttttagccgattccgcagcatccttagcgaggtatttcaatttcgactgtaatgcatcaatacgttcaatataaccatgcatttcttcctgccattgggactcggcagtcttatgttcagccttcagacgagcgatatccgggttttcattctcctctggtacctcgggcgattcaacgctaacccgcggactatcacccaaaccaatatcactcaataccgaattgcgttgcaaatccgaaatttcttgactggctttggccgagtcggttgaggattgagccacctctacagagatcctgggcgcggagtctgcgacgctgatgtctgttgaaacacgcggtgatattccggagtcgtagcttatcctcggtgaggctaatttatctgcaatgctgtcgtcatttggtcgcgagatctcggagtcttccaccgcactattcaccgatgcaacgctggaatcaatgtccatacttgaccgaggttcattgctaggtactgggctagcaggcggtgatgagactcggctttgaggagaatgggaagagagattcgaggcattctgtttcaccatagctcgggctagacgttcctgaagccggtcatttcttcgcgcggtcgatgaactgcgggataccgctgaaagatgttagccagctcgactgaatcgcacatttactgaggatttcatacaagaagcaggagcctttgtcagtggtgcatctccgccctgaatttcagtgggctttgcagtagagttggtctggtttccctcctcatccatcaagatgagatccagccgagactcgacgccggctactgcctgctggaaaaaagaacccactccccattttggcttttgtgcctgcgagttctgtgccattgtggcagaattactgtactggatatcgcgaacaggctgctaagcggcaaatgcctcgtgtcgcattcgcatggattcggtgggggctgcgctcggacgtcgacttgcgattatcgtggggaacgttgcaaaatttcagaatcaaggcgacaatgattttgctagaagtattgaagcctaggcggcaatggcaaggacttgccgcgagggcgaatgagggagactggcaggattaagccggattcgaagtactaggcgggaatgcaaacaaagattaagacgctggtccgataagacagtaagaacaaggcaaattatcggcagaagagtctatagaaacaagaaagacgatagagaaataagacgcgagaaaaaaaatagagaacagaagacaagttgaggctatgcattgagataccgtaggtcttggcgcgggcttccgtcatccccaagctcccccgtctctctggacacacctcgagtttgtaccattcacagccagcgacgctcatttttctggctcaaaaaccccccagattacacccacaatgtcactggagccacccacctacctcagctccctccagaataacatccgagctcggccaattccgtgggagggtgccgtccgggcgggcaacatcaccgatgaccacttgaagaagatcaaggcggtggataaggtgcgcaaggagcaacgccgtcagacgatagaaggagatcttgctggatacacagatctgttggccggcggtgcacacggaaagagtgtcttggactcggcctcgagaaggaccgatattgtgcagtatatactggtgctggcctcggacttgattcaaggtataacctactagcggagctgaagttctgaggaatcatactgactcatattaaaaaagatgtgcctgctttggccaactcgcttgtttctcaccccgaaccgtacaagcccttcctaccattcttgcagcactcggcaaacgccgaagaccccattcctctgctcacgtccaccttcctcacggcgctcgtgtcgcacagtctcgttgcctcatctaaacctgcaccccgcgacaatgaggctcttccacagctctacacctatctctctaccttgaccaagaatcaggatagtggactccaggatattggtgtccaaggattctctgagctgctaagaacaagccgagcccgagaaatcttttgggcgcaacgtcaagagaccttgacccccttgatcgacactcttcgagctgcggcgggtgctaaagacaacgtcagtaacgcaagcacactgggaagcagcactcgcagcgtcgagcctggtctcgccggtggtattggccttcagcttctatatcgggtgctccttgttctatggcagcttgcgtttgaaggcgctctcgttggtgatgaacttcaagagtgagtgatgtgaagacaagagatcgaatatacactctgagctactaaccccacacaggaactatgaaattatccaactgtacatccaccttctgcgtctctcaccgaaagaaaagaccactcggttgcttgttgcaactctgtacagtctttgctccagcaaccggacaactctgctacccatcgccgtgttccttcgactgcccgccctcctgactaacttgtctggtcgtcatctgaccgatcccgacctgctcgaagatctcaacgcactctcttccatgctggaggagtacaccaagacacagaccacctttgacgaatatgccgccgaagttcagactggccacctccgctggtcgccccctcacaagaacccgaccttctggaaagataacgctcgacgaattgttgaggagtcgaacggcgctttgcccaagaaactggccgagatcctatctaagagttgggataacgacaagcaggtactggctattgcttgcagcgacgtaggtaacttagtgaaggaggttcccgaacgccgtgggcagttggagcgactaggcctaaagacgcgggtgatggaactgatggttgatcaagatgaatcagtacggtgggagagcttgcacgctgtcggcgaatggcttcgatatacctttgagggctgatccatcaaagaggactttcccgatatgttgatgggcttaccaggatggacatatactctggttggcatgtactgtgtattttcttgccatggcgcatactcgcttctttttttccgggggagaatattagaatcatacttatctatgaaattcatggcccctatattctgatacatattccagtactctaaacggtggatattgcggtcggccgctaaagaaccccagacctgcaaacacgctgcgacaagacaagagcaggaccctcgatctctctctataggatctaatatcatgacttcaacccctatcgctgttccctagagattatagattacattcgccacgcgggcggcttatcggagagctttccattcccccgcaggaattcttcgccgagaacatcatccaaccgttcaaaatccacagcacccatgtcgagatccttcacaggttgcaagagatgtaaggcacgccgacaaaaatgtgacgagctgagaccgaactgcgggcgctgccagactgcaggcgagcaatgccaatatgcaatgcagttgcagtggggtggacgggcattctcgcgatcccggtttggtgcttgcgtcgggacaggaggcatgcagagactcggtatgtctttataacagagggaccttgtacatagttctgactatcccagaatattcaccaggagagttcatctacaccaccaagacggcggtgcagtcagccagcgccaaaaccggatcagatctcaccctatcgcaacccgtcgatcccttctcgtccttgtcgtccagtcaaaaggccttgttgcatcattttatcaacgatgcctcccaaatcaccgcatgccattcgggaatgcagcaggacataactcgcatgctgatcccaatggctcttcagacaccttctttactctacgctaccaccgccttatcggcgatccatattcaagccctacacaaccagtcggagaccgtaaagtcagcaccggatattgcccgcttaatggctctcagtcttgaacatttccgaacagaactgcagaatccctcatccaaggatcccgaggcgttggtggccacggctcggacgctctgtctagctgagatccattctggggcgatcaacccgaactcatggagagcacatgttgacggggcgagggcattgatgagggcatctgacgccgctggcgaagattccctgcggtctacaagcggtttccggcgatatttggatcgttggtactggtcgatcgtgtcgcttacggcactgacgggcaatggtccacccattggcgatatctctgactttgtctcatctgacttgatggggttgggtgggtccactgattatttagatgactattggggtttcagtgtagaccttgcggctgtctttaggcaaatcggcgctgccgcttggcgaagccatcaagtcgagaaggctacccagggctttgttgcaggagaggttgatgacagtgttgagaatgatgccgcgtccttggagttcgcaattcgacaactcatgaatcgtgactctagctcgcagccctctttttaccctagagccgctgaaggcttatctgcagagaccgcgcagcagctcctgctatgcaatgaggcattccaacatagtgcgcttattcagatccatcgaagacttcggaaaacaccaactacatcgccagaagtgcagcagtcggtccgacgtatcctagagtgcaccgcgcagattgggccatcatcaggtctctcgccttgggtgatgctaacgacaccaatctttattgcgggctgcgaggcgcgcggtcaagatcgagatacagtcaggcaattactgtcgtcgttgcatgacactatccgcgtcccgaacgttctccagtcactaagattcctcgagcagtattggtctaaccaactcagcgaggaagaagactggagccatttcctcggtaaggttttctcttagccgtttctttgttcatgctaacatccgatagaacgaatgcagttcgatttcatcccttactaaggagatcaggccagagcctgttatgcctcacgtgcaatgattcatgtttttgagcttgggtactatcttctttcgttacactataacttttcgtgtgagcaaatcggtgttggcaggggttttggcgagcgcatgtacctattaagccatggagtttggaagtggcaatattgtttttaagcaattgtacatgaaatgtctttgttctttcgaagctaacactttttattgggctcgcctatatttaaatatctgagtattagttcgaccaaggaattgaccacatggatattgaagtaaaaggcgccaagcctaggagatatatagacggaactaagcagctaatctccgcattcggacataacaaccaaatgacgcgatgagtcaaaaatgataacattggaagctggtttgcatcatcgaatctcaaagcttcatgatcccgagtctagataggtcagatatagcatattctaaccttatacgggtcggagtcgggtcaactcatatacgaaaccccgggatggcgtctacgagccattatgattcgcgtagactcgaacctacactccatggatcgtataaccttagcattataagattacctatcaatagatgcgttcgaattctttgaaatcaagtattctgattcctaatacacaaactttagtcattcaaattcaaattcgaaaacgtagtggtgcttgggaagtatatagtctgttataactacctctcaataggagcttgatttgacagtatctcatctcgttcggtcccacgaacctaagggtgtctttctcgtccttatccaatggaatctgtcattcgagaggccccattcgggcagcttgttcgtctcttgacgaacaataaatactttcaataccccgaagaaaagcccgacttcaagcttcccgacacatggcttcagttgttgaactctagggatgaaggtaaacaaaagaacgccatccggcatgactccaaccgaagccatgaacacagtgagcccctaagccggtcctctacccaggcatccatgcaattcaccgaagctcgcctcgaggccgacgaagaacatgaaatcgagaaagtcgaatccatccccatcgcccccaagagaacaaaagacggttctatcctcgttgattggtattataccgatgattcggagaatccacacaactggtccaacctcaagcgcgctctcatcactattgtgatctgtctatatacctttgtcgtgtataccacttctgcgatttacacgtcctcaacagaaggtgtcatgaatgagtttggtgtgagcacattggttgctactttgggtctgtcactctatgttctagggtatggtaccgggccattgatcttctctccactgagtgaaatccccgtgattggacgtaatccagtctacatcgtcacgatgttccttttcgtgataatctccatcccaacagcttttgtgggcaacttcgccggcctgatggtgctgcgatttctgcaaggtttctttggctcgccctgtctcgcatctggaggtgcttctatcggagatatgtatagcctaatgtccctgccttatgccatgatggcttgggtttctgcggcatactgtggacgtaagtttccttcccgtttatatatcgttatatacaccaaataacgttacctatactaacactatacagccgctctcggccctcttctcagcggctttgccgtcccagccaaaggctggcgttggtccctcttcgaatcaatctgggcctccgccccggttttcatcctgatgtttattttcctcccggagaccagcagcgcaacaatactactccgacgcgctggccgtctacgcaaaatccacaataatagccgcttcatgtcgcagtccgaactcaaccagcgcaatatgcatatctcagacattgccatcgacgctctgatcaagcccctggaaataaccatcaaagatcccgccgtcctcttcgtccagatctacacagccatcatctatggcatctactactctttcttcgaggtcttccccctcgtgtatccagccgactacaacatgaacctcggccagatcggtctagtcttcctatgtatcatggtctcatgcattatcggtattgccgcctacgcgagctacatccacttctggatgcaccgtcgcatccgccgctccggcttccccgtaaatgaggctcttcttatccccgcgctgcctgcctcttttggtcctctgattggccttttcttattcgcctggacggctcgtgcgtctattcactggattgtccccaccatcggtatcactatctatggtgccacggttttcgtcgtcatgcaatgcatcttcatgtatattcctctcacctaccccaggtacgcggctagtctattcgctgcgaatgatttcttccgcagtgcacttgcatgtggcagtgtgctgtttgcgcatccgctctttgggaatctgggcgttgctcgaggtgtcagtcttcttggtggactgagtgttatcggtattatcggtatttggttgctttacttctatggtagtaggcttcgtgctttgagcaaatttgcgatctcggatgaggttgaatgattaccttgtggtttaatcacgatttttgacgaaaagttattgcaggatatttgttgatagcgatatacggaaattgttggagaggatgagacaaagagcgacgttacattaacgatgaacgtgaatctcgattctcgtcatgaataatgagaatcttaatatttaatactgtgaggagctctttgtctcttgaataaatattgttaagcctcatagaaagatgagagaagttgatccggatcataatatcctcaagctcaccaattacgagataccctcatcgttatttctgtgcacgcctgtttgcaatgaatggcgctagctattctacctgaaaagtcagtgattaccaaagtttaatagtattgctttttctatgaataggttggcactagtaggaccaattgttggcacagaaatatattattaaaaacgcgtgactttgaatagattattccagaaagatcatttgaaaccataattggtgttaccaatcttcaacttgggtttacccacagagagaagtgatatcctcagggacgtaggtgctcatgatagaaataagcttcgagagagggacccagtcaagaagaccgtggatgcttcgtacgggatggccactatacaggacccgggcgtagaaagactttgaacccttcctatctttcgtctccctgtaaaactgttagagaattcccgtattagaaaacagtctgacttaccaaatttcgaaagcaatgttggatgccatagcaggccagcgaagcgcctcgattcccaaagaaccgaggataggaccaatatctccatcatgaataaaggtgtggctgtaatcaagggaagactttccgctcaggacagcctgcagacgagaaacgatctcgccaataaacaagccctcgacaagctggatgtacttgactacatccgggttcgtgcgccagtagtagttccactcccaatcaccggcacggaagacctcctgagccatctgcttcgtgacacaggttgagggatctgacagactgcagggcaactcatagccattgcaaagacggccctggaagttatccgaaaagtggtcaaaggtattctgccacgaactatctgtcgcgcccaacatagagccgagcttcgagcgcaactccgcggtaacattcatatgctccttccactgtgtggtagactgcagactagacagagtagagctgatagcagagcaggagtatccctcgttgacagtatcaacggatgaaaccatttggtgcaggggcagggctccctcgtagtgaggccacatgccacgcaggaccgcgccagccgaagcttgggtgagaacggactcgctggagcggaaccagactcggttgtttggcttggcagggatcaaaccaagcttcttgccgtagacagaccacaggtccttgccgtgctgatatccgtcctggactcctccgatggtgatctgagggtactgacaggtgccgttcacgccggctgagaaggggttggtggggtcctggtatgtctgcgcatacattggcatgggctggatgccgcttgcgctgttagggcctgcgtagagatacgggcgcacattgtcgcagtgatactcttggttctgggaaggggttagcttaggcttagagtcgatctgagagttgcttacctccccacctgggagaatgttgtacggagttcgtcgctggtgacgctgcagatactccaggtacaccagctttcccttagttgaccccttggttagagcttcgggcagttcatattccgctgaacgagggtgcggcatcgaacagtagtcatagatgccgtaggggctgcccccggtcggtccattggttggagcttcatagataccaccatatgtcccaattgagctgtcgctgatgtatgacgtatcattcagcgttgggggatagaaggtgtccaccggggtgtgacccagcacagaggctgccacagaaagcaagacgaagctgcgcatgatggagatgggcttgagtgaggagaaccaagactggcgaaggccttcaaatatatagatttccgaagccatcaccaccaggcccaaactgataaacaagatgaagccccaccgcattggaaccagtggagattggaaaatcggcgcacgtgggatcggcaggccaacctgagaggtgctagcaaccacgtggctcggcatatagtatataaccaactttcggctaaacgattgttctcaacgtcgtgtcgtccgatcgagatgcaatttcccgatgtttccgatttcgggtctcggcattacccctgcataatcctgccgatatcagatgcttagcaaaaactatataacactatatattccagtccctttgatcaggatatttgattatcggtcgactcatctctcacttttacaatgatgtggaaggcttcccttgttatggccatggccatcccgctggcgtccgccgccctggcggattacgcactgcatacagtccttgacaatgctgctccgatctttggatcgtacaaaaaggtcacagggggaaagtcggaatggatgaagaaatatcacgacaacactttgctcgttcatatgaacatccccggcacccacgacagcgccacgggaagttacaaccaggcgacgcaagatgcccttcggggcattacagatctcaaccaggtcgttgttccggtgccagaggcattgacgtgccaggatgtgaatttcatcaacatgctcgacatgggaatccgggcatttgatctgcgatatgctttcgatccaacaaacaccactctcatcttctatcatgcacaggccctgctgtcggagaaagctagtgtcaatgatgtgctctttggcttttacaagtggctggatgatcacccctcggagaccattttcctgtcattccagtaccagggctcgacagctctgtacgccgaaaacaacgcggctgtgcagttggagctcttcaataccctcaccagccccgcagcgcgccattatttcaagcaaacgaaggatgaattgggtaccttgggcgacgcacgtggcaaaattactctcatgcgccgtttcgacctggaccagcttccggataactacacagccgcacttcccggcctgcacttctcgcccaatctctggaatgataacggcgccgccatcgacctggtgtacaactcggacaagaacttgaccgcctacatcgaggactactaccagccgctcacgcccactgggtccagtgcggttgagaacatcaggtggaagtacaacgccacgacggaaaacatccacaaagccactacccagcacccgaacagtctcttctggacatgggcgtctagtaacaatatcgtcaacaaccctcccgattggcctcggatcatggcacttggaaacggcacccactatacaccagctggtggagttaaccagcagctagtgcctttcctgaagaagcagaaaggcaagcgtgtgggaatcgtgatgtttgatttctttgagcagccctccaacctggttgatacgcttttggatttgtgaaatacaagatgagcgagatgttgttaggagaatagtcaatgaccaagcttaaccttgggatcaatagattgaacaatgtggagccgaatagattacttaaactttcctcgtctatctgtgctataaactccacaattaaaactggatattccaagacccatcgctcgcatcacgcacgtggacacgcccccatcaggtttccctacccgcacgacccttcccaaggaacaatcaaattgcaatgccaatcaaatccgatacaatgcccttgtcctccgctgacgtcaagctctcaactaggcttgcccagcttggtatattgatactgcgcccagtgaggaaccccatcttccaagtttcccacttagtcgtatccaaagagcacatgaggctagcacaacgggcgaattcatgtttctccagaatgtcctcctggtcaaggcagatgcatctccacgcatcatccaccttatacacataatcccagatatcataacattggctgtatttgattttttgcaactcaagccagccagatcgcaccaaactccaatcagaaggtttgcagtgcttctccagcttctcccacatctgctgtgggtttcgaatgttgcgaacaatcagcctggtcgtggcagataggtttgtattaatgatttcccgcgccgcctcatgcaggctgtctaattggggttccaagtgatgtgcttgagaaagttggccgattttgccctcaaccaaatccaaaagaaaattgcggctcagaatatgcctcattttgcggctccaggcgcggtagtcggagcggccgcgcaaagggggacaatcgcattctattgggaaattatcatcaccgaatgcatttcttaagctgaaggtacgttcgatcaaggtctctgcttcggtaatctgtcggtcgctggggctttcgggtgcgacagtcatctcagtggaaatctgctcggcggaattgacccggcgtctttttgcgggcgaggttgaaggttcatctcccggaggtccttgtccagagagggatcgtttcgtcaatggtgttgaggaggccatgctgtttattcttgacgcgcagacctagcttggtggataggaattctcaacacagcaggtcaggacagggcaatgataatcgataaggaatgctgtgaattttcataggataagtattgaaatattgaggtatgacataggtaactatcaccacgtcgagcaaggagaccaccgtttatatgtacctagcccgacgccagaaatattcacttccagaaaactgtttgctcaaatatgcagccctacattctttggaaaatccagaaacttgacattttagacataattcccccttttcaacttctctggatagcacctaccgcatgtgctatcgagtctctcgtggcaaggtaacagctcgagtaactccgttgtattatagggcacaaagaggatcgatttcgtagatgtaccaaaagctccaaagaccgtgcttgttctttcttccctgtactcacatacattccgcacaacttctcagaactctaaacctctctcactgaatacctacctcggcttgaaaggccagaatgccagcaactgcaacgtctacaaatgcaaaaggaggagcaaaaatagtactcgccgcgctaccagccccgcttgatgctgaggtagctgtagatgtactctaagctgatataccgcttgaactagtggaagtaatgccggtggaccctataggagataggagagttacaggtaaaattcgatgtcatgaggcagaggtcacggttggtgtagttggtggtagaatttgacccatcatgttgctcgtcatcgtgatgttattgaggaagcgcatgagtgcgttcctgtcatggcaagagcgatggaacaagagagatgaagagtgtaaaaatggaaagagcgttcgatgaaaagcaggcgaaaatttttgaagctagcatatgatctacatcatgatggccataatcgctcatgtgtcatttggtagaaaaagtatatctcattgagtttcagaaacaagggctatgtaatgcttgacccagggcatgatcttatctgacttggcacatcagtgaggtgggccgatcacaataaagcggagagaaaaggcaccaaaatcgggcaatattgtggggtggatgacaaatgctgccggagtagcctcggctcgtcatgacgtcatcgagagagggccgtagctccaacgaagataaaataccgccagtctgcttgttggaagtccacgccgcaatcaaagtcgtctgattgattgggtcaccttataataaatattaacgtataatagaccagcaaaagaaaatgcccccccctcgcaaagctctcattgcaatcacctccgctcatgctcctctgtacccggagggcaaagagactggtaagcctctacttcgaaagacagctcaagatcagaaataacggcaacttgacttaggcttgtttatcactgaagctttgcaccctttccttgtcttcaagaaggcaggattcgatgtcgatctagtgtcggagaccggatcttaccaacccgactggctctcgcagcagaaggactggcttaacgatgaagacaaagctatctgggaggatcactccagtgaattccgctctaagcttgatgatctcttgaaaccgagtgatatcaattccagcaacgtaagtctcctttacggatacttggaacccgagctgagcattactaaatcagtatggcctatttttcgcttcggctggtcatgcctctttgatcgactacccagaagccaaggggctacagagcattgtatctaagatgaacaccgacggtgctatcatctctgctgtgtatgggtaactgcacctccgagctaaacatatttctaattctgattaggtgccatggcggtgcaattttcccaggaatcattgatcccagtacaggaaagtcgattatcgctaaccgaagagtgactggcttcactactcagggagaggaggaagaaggtgttctagacaccatcaaaagctggaaccggcccaccattgaggcctccgctgcaagctcgggagccacatgtgagttcgatgtccaaacgtcgattttttgtatgtctgacacgacattagatgtctctcctcctggcccttgggacgctttcactatcaccgatgggcgcctcgtgactggtgccaatcccgcaagtgcgcatgtgacggctgaagctgcggtgaatgcgtttgatgctatctaaagcctagatcacttgggaaacgcaggatgccctctgttacccaggtagtaatagcaaatatagtatcatccattctcattacagatcccagctatatcgtaggtgtatattaacttcacggtagctttgagcgttcaaaagcctcatcggttttggaagtggacaccaactcgcgcgaagaacctggatatgtgtgaaccacaaaagtgagatagttatgtagttcacccccaacaaatcgcttagtggttcacatgtcttcgcgagttggtgtccttttcgttcttggtcttcgaaaagatatggtgattatgaacagcaatctggtcagccgtgatgaattaaaactagatgcaaatgtatcactgaagatgtatggaggaggatgatagaggaaagggaaaggtgggtcttgttgtggggctgctttaggggtagtactaagccttcttaaggttgtataaactacgtaaaaagaagatatccataaaaggtacatttaagaagaccattgaaatgactactgaagccatgttatgccttcagttattcctatatatatcgaaaaaatgatttctacattcgaccaatatgattttaaatgatatgatacgaaagggctcaagctagatcaagacagacatagcatgaacgaagtgcaaccaccgggacctactctctgtcctggtatttttggcagcaatgagaaaaatattgattggcaaatctggaagacaactaaggcttgatctgctcactaaaatttggaataaatgctctgacatcatacaagtttggaagtttggaagcttgatagtgaaatgcgggaagctggacacactgaggtatagcatttccgttgtagttttgagttttgcgagctacctaatcctctccataaaatatcaaggaagttcaattccttctttctctgctgtctgtaagatgtattgcttgacctggataaacacaacataaattagccattctaatccaagtggatacttatttatggcgaggtgcttaccttatcatctgggactagctgaatcgccagtcgaccttcattgtctctttttgccgcctctgctcctgacttcaacaaaaagatcgcagcgggcccatgtccttcagagatagcgtgatgaagtgccgttaatccgtcaccatccgttgcattgacaggactcttaccctcttccaagaggagcttcaagataggcacagaccctactgcggctgctctgtggaggggcagttggccacgtttatccttgactctggcgctgcatttattggcaagcaaggtgcggacggtggaaagattggccttggaactggcgaaatgcagcgcattctactagatggtaagttcatgtacatccagtagccaaattcgggtctcagaaagctgacctgtccagtgtgacttttgatagaaacatcggctccttttcgcagtaataggtcgatcgttgcgtcgcctgcggcatctttcaggctagctgcaatcatcagaggcgtccagccggatccatcctatgctgatttagcaagtttatatgacgatggctagtcaattttgaaaaggcttgggcattcttttcgaagacagaatagcgatactcacttctacgtctgggtcgaagtccttcatagcgactagcaattccacgaccgggtgtcggttgtaggccacagcccagtggattggaagacgctcatcgtcatctttcacgtatgcggattttgggtttgcctgtttcgatgattagccttgttctgggagatcgaacagtaccagctcgagcttgatgttgcggggcagcctcggccctaggtggagcacaactcacattgagcaacgactcgacaacctcatctaaagaaatcagattagtgcttatttaatacaaagaagggtcaaactctcacttcttccttctcgggcagcctcgtgcagagggaatttctgatcggaatccatgacgactttggaggaagaagagtaatattacgataagagctccgataagccgggcggctgagtcagtaatattgagcctcgtgatctcccgaagagggtaaaatttggccaaaatgaatgtaggtatcaatttactgctctaaaaagattgagtagagaatatattcagttggagggcgcatttgactcatgtagccgtcgttatatatttggtaaatcaggctagaacgggaactagcagttacaagattcgctacaaagtaggtaaaccccacaacccacaacccaacaggctattattattgttataacttgttataaatggtcttatgaaagctcattaatgaagatattcatatgtctttcaataattaagaactgattatctgaataagaacacccggttcaccgccctctaacctcaccgcccgttttagccggatataattgttggccaattatggcgcctcaggcacgaacatccgttgcaacttcgatccaaagattcatgcacgtccttgtaccatcttcaaccatatcttgtctcgcagctactagagacgcagcgtcggtattctaattcaatcaactgcacttttagaacaagtgccgagactgaccctccggactcgattgcagtcacgaactagccacaggcttttttcatcgcgcgcaccatcgaagtgtgattctttggagctctcatccttcaaagcagaccgatttatctcacccccccccacatcagttctttgcacacacaaaatggactacagcgcaccccattccgccgatgatgccgtgcgcatgtccgcgaagcggaccgccgaactcttcggtgccgaatacctgatggtcacaccttcaaccctcacagacggctcaattggcgtttcctaccgacggaaggcggagtatgaagatattaccgagctaccacgatctctcgccgagaaacaggcgaaagcttcagccggtcggacaaaacggccgaggattcaggcgcagacacccgcagacggtagtggctcatccatgtcacttgtgaggcggccatcgggcacgggagtaggagctgaggaccagcctaagagtttggttcagagaccgtcagccaccaagcaacagcggcccgagtggcacgcgccttggaagctgatgcgcgttatttccggacatttgggatgggtgcgggctttggcagtggaaccaaacaatcagtggtttgctagtggagcaggagatcgcacaatcaagatttggagtttggcgacgggcgcattgcgactcactctcactggccacatctccaccgttcgtggcttagcagtgtcaccccggcacccgtaccttttttcatgcggtgaggataagatggtcaagtgttgggatctggagacaaacaaggtcattcgacactaccacggtcacctcagcggtgtatacacacttgcccttcaccctcgtctggatctgttagtcacaggaggtcgtgatggcgtgtgccgagtctgggatatgcggacgcgcagcaacgtacacgttctcagtggacacaaaggcactgtcgccgatatcaagtgccaagacgccgaccctcagattatctccggctcgctggactccacagtccggttatgggatttggccgctggcaagagcatgggcgttctgacacaccacaaaaagggtgttcgcaacatcgccatccacccctccgaatttacatttgccagtgccagtaccggcagtatcaagcagtggatgtgccccaggggcgatttcatgcaaaacttcgaaggtcagaactctgtcatcaactctctgtctgtcaacgacgagaatgttctcttctctggtggtgacgatggttccatgtccttctgggattggaagactggtcaccgcttccagtctacggaaaccactgcacagcccggctctcttgaagccgaagccggtatcatggcttctaccttcgatcgtactggcttgcgtcttatcacgggcgaagcggataagaccatcaaggtctggaagcaggacgaagacgctacgccggagactcaccctctgacctgggcccccactctcggtcgacagcggtactagagggatgaccagcatcactggcattcgtaccctccgttccgatttctcaataccctgtatttattttccttttttgccatcaagtttttatcggcaccatgcggagttaagcgcggtctggaagatctttgatcttaaaatattcaaacatgtaaccatcgggacaaatttcctcggaacggtttgtttcatgctctgaaagaaagagtcatagagttttgtatgatacaaaccccaattgagccaaacgatacccttgacaatcgaccctgctagacaacacgtacaagtagcctctacggtctagagtacagaagacacagctggactgaacgggtatcatatgcaaactatattacactaactctggataatgcgtatcgtatcaaaaatccccaaagacaagcctgaccatcaccgctcaatacccaaaccaaagcccttagcctccgcatcctccctgaaagcggacctgacatcttccgctgcaactctgagccgaactttactactccggtcgccgcgagtggggatcgtagtacccccgagcacgcttttagagccagagccttgctccagtgccaggacacccgagttcatgagcaacatagctgcatagcccaggctccgcacgcgagcagtggggcctccgcccagtaggaaatctttcacgccggcgcctgcggctccagcaatggcgacggctgcatcggcgatgcggcgggcttcgtcaaggacgtcgccaaatgtagattccgaaatgccagttcggtggacgcgggctagtagggcagcgaggaagagcttccctgacagcgggaggcagcgcaatgattgttggagtggagttgatgtagcttcgtgaatagcttgcttgatagtggcgatagtgacgcgccccggctgaccctttgcaggaggtttagcgatggttgattctccggctgctttgactgcgacagccttgttacgccggccgggggttttgctgggcgtaggaggcaatgattctgtctcgtctttggcctcatccgcggcagccgcctcatcggctgcttgctcggcgatttcaacggcccgacggcagatgtctaaggctcgtcgagcatcgccactgacagcggctactttgcgacttgcgaattgaacggcgtctgggtcaacgatattgcccggtacactggccaggcgggtactgatgatttccattagatctgtgtgacggtatcccgggaatgtgatacgggttaaaccgagacgactggatattttgttgcttagggttctttcagggagatccatggtgtttgcaacagccaggacaatgaggcgcgaatggcggagagcaggccagttgaagaagttatacatgacagactgattctttgtgacaagctgatccaattcgtccatgagcacaacgcaggagactcgacgaggggagggatttgagaattctctttcgagaagatccaatgcgtgggaaggtgatactcggtcgcccttcaaggcttcccatagtaaggagtaggattgatgcgggtccgtgactttcatgccgttaatctcgacaaagatgaaatcgtccatctcttctgcatgcacggcaccgtttagctgcgcaaccacctcacgcactgtggcagtcttgccagtgcccggagtaccagagatatagatacaagcgcctgtgccttccatgatcgcagcgctaagatggttgtatacagtgttgaactcggtcttccggcacggtaatgagtctggaacagtggagacgtgtagtaaattccgagcctgacggtaaggagagtcaaaatgcgtgggtgagaggacacgggtacccagaggagtaaactcaagtggtttttttacgacaatcctgatacatgttagtcttattttatgacacacattcaatctcgctgtttcctaccgtttatgggttggggtcatcagggccttctttcgctgtgattgtggcgtggcattcgttgctgctagtcgttgtttctttctcggggtcgcaggcaccgtgatctctttggtatcgacatactgtaatggtccaaatcagcgctggtttgcagttggaaccgtgtggtttaactcacttcatcgtccgcagccttgcgtttcctggaagccttcaagccatccctgacccagctgatcagatcttggatgttgttttcgttgtacatctcctcccagacaaactcctcggtgtaccgtccttgaacctggttcacgcctcgtcgacagacaatgcacttgttatattccgccaattcagtcttgttctttggaggtccattcgggtatttggcattgaagatactctgagacatgactgcccccttcccgctgattgatgtcaaggggttgctgttgaaatcgagtgtgatgtactgttcgttgggcaaggcatcggtcctgcgcttgttcctcgtgcccataaattcgtcgggggatgcgaaccacataatattggcggatttgacaacctcgtcttcttgatcttcatcctcctcctccaaaaattccgtaataatgccaacccagtcctttccagcttcaggggatttcaaaagaatcacatcaccgactttgcattggaattgacccatgtgtgcgccaatgattttgcgtttttggcgcgctggacgggatcgtcttcggctgcgtttcgccggggtatcatggttggcctcggtctcttgggtagtttcctcagttgtgtcgtaaatccactcccatggaaggtcctcgacgcctagttcatcatcagagtcgtctcgaaccagagctcccttggtcatccattgggcgcgttcacgggcactgcgcctttgaggcgaagagtctgaatcgctatcgctcatttggggtgtgggagatatgacgggcagaatgcaacaacagagaaggagaaatcgcgcttgacgcgttgtccactttcgtcccttttaggtttagtctgacaaggaggtctagccaatcaaatccatatattgctaccttatagtaaaacatggagtagagtaaagtgcaggtatagactatacatagtatgtgaatatacaatatttcttcaactaatcgcatacacgtggattgaaatcatctttaacttgcttcaaagacatcactcagtatattgtcaaactactttttgaagtttatctactaacgccttggacatttctggaacattttgtagagccaggcttaatctccagttatgtctggcataccagaagttccctggttgatttgaaatgtcaaattaatacatcattgaaaaagtgaggttgatcacacttgccagatgcttcaagattgcggaacggatatacgagatcggagatgtcggagaaacataactccggaaccctaacaaaatccaacgacatctcagaggatcagatctatatacttcctaatgaatttgcttttacttgacttcttactactataagtgacttttataacacgaataccaacatgcaatgcacagtatgtctcttttacccttcacagccaaacaggtcggcgggaacattgatttccgagtgtcttgatctatcaatatcttcttattgtacagaaagtcaaatagtggacaagctgagatgttctctaaggtaattcatatgacctggatagtcctggggtctctagctactacgccgacgcatatgtaatcaataaccgcggccctgtggctccacctaggcaggaatccatccatggatgaatgaatgctcttactctttgataactcccacccgggcagcctctctctttccccttctggtcgcattggttaattcatatttcattcccttcctttatctttcttttacctcccacacgagtagcattccttaagttgcattccgtcgccccccagcagtcgccctggcagtcgatctttgttcagttccgttgcactttcatcgcacttccatcgaaaagtagcgaactactaatcccccctttctttcacttctgccgtttgacatttccaagataaccgcgtcaccttcttccaacttagctcattccaacaatccgtcctgtgagagatcgctacggtcatcgcacagctgtcgctatcagaccccgttgaaatggcttctctacccgagccccatgataaggagtaagtttatcttacacatggataattgcaaggatattcgctaactaattccaccagctgggagcgtaccaatgccaaatgtgagagataatttggttctcaatcatggttacacgtactgacttagatagcatgggaactaccctattatggccctggtccagatttcggccgggggaccatctacgatggggatgccgaccagaacacggataataaaagtaccgatgaggatgatgaggatgctttcgaggacattaactacgaccgccctcccgttgactatcagctgcaccctacaagttcaaaggttgctgtaactggtcgggctatctcaagtgtacctcctgtacctacgccatcgccggtcccaagtcaaagcacctttcaaacccgaccagttcctactgggtccagaacaggtcgacctcagtcaccaatggggccagtgttcaatgagcgtgggcctaataccggaatttccaatacattagcacggccgcattattcggcatgtaatctcaaaccaggtcaacgtacccctgtcaacaggggacagactgacacaccgcgaccaccgttttattccaaaaaaggcagcactacttctactccttcgcaacacaaagctaggtgtccagctatttcatcggggcaaaatgactctcattccaaggcaaagtggcgcaaggggttctctccagatggtaagtatgctcacatcaacctcaagtccaccattaacgatcaaatagcgtcttatcgtttgccatatgagtgccaagtgtttcaagagaagtgagtacatacagctttgcagtagctggtcttaaaactaacccagacattgaaggattagacaagtcactttaggagaaatttccaacgtcgacttccgtcagcggattatcgaggagacagatgcatatatgaggatgagcgcgggaaacgccaaggtccgtttttgctaaaaccctccaatatctagagactcattatactaataatcatgaagcttgttcacatctggggacggcaaaagcaggtgttggaggcccagaatttgcttcaggatatggtgaatcggttgatgcagcagcggacttcgcctacagtagcgcgctggaccaaggttcacgcgcattcaaataggaaggttgcccatgcccggtcacaagaaagccatgaggaaagattgtccgacatgcggaagcccccgagaatcaccacggattacacggtatgtataacgctcagcccgccctactttgcttccgtactctatggatactgaccgacacttgatactacagctcgctttcctctggccctcggatggcccctcactcaaccacttgatcactgcccggcgcgagctcctcgattccattcgattgagatatgacgtgaatatctacatcaagcctggtatcccagactaccttttcatgtctggaaataatgagcgggatatgtccatcattgcatcccgattccgagagctatgggagagggtaatggtccagcatgagacggaaatcaagctgttccttgttgcggcgccccgggcagagcttatgagaactcacgtcatcctgcaaaagtccggtcggctctcggtgcctgttatctgtggaccggagctggccccagatgtaaccgcaacctggaagaccactgcggatgaaatcaagctcaataacaagaacattgtcaccacccgccttaggaaagcactgcatgtgattcctcaatttcggggattcctgcaaatgcgagcaaagttcggttcgttcgccctgcaacagtggcgcaagccgaatgatggcacttcttatgagttctcagagtttcgtgagatgcttacccatatgaacaccgaaggacgtttgctcccagggtatgtgatatgtgatctccgccataatctgatgatttactgactgactgatcttttagaatccggctgcagcaagatgagatctttgaccggatcatggaatcaacctttctaaagccctggggtaaagccaaaatcaaatccctgctgagcctgatgcccaaatattccgccaactttgagtaccaagtgaacaaggattcggtaattcgcgtggaggcaaaattctctcttcctcttggctcgcaggagtttgaagtcaacggagtccgttgtttcaaatccaaacagatcggtgctcctgttgatcgtcagatgcccatgcagatcagcatgattgactttgaaaggtttgtctacccaatatcctttcggaattttactggaagctaagtttatatataggtccgattggcagcttgaagtgaaggctcttgaactctgccccgaaaaggagatatcccccgagctagacaaattcatgcgttctattgctttccaatggaacccgagtgcaaagagcattggatctgtcccccagcgcaaggcgaggttctcatatggtgcgccagtcaagcgtttcgtcgagaaggccacaatccaactccaagtcaaagactcgccgcatgtcttcgagctcgcccgcttcgacgagtacacgtacggggttggtcactggtcgatgacccccaaagtgtcctggggtgcatcgctgttcaatcctagttgggatgatatactaggtgagcaggctgatgtcaaggctctcgatatctccaaagaggggtgtctgtcggtgttctttcccccgccgggagatgagcaggaacagacagaaaagccgaaaacggacgatgagctccgcaaggaggtcgagaaccgaaagatggatgaggagaagcagctgggctctttcatgagcactgtccagcaggttgcgcggatgctaggaaatcctggcgctgagatgccagacttccttgagaacgatcttggaagtctgttctagtcgatgtgtgcaaatcgtcccaaatttgtcgcatctcatgcgaccacaagggccaactcagaataataaaaaaaaaagaaagaaagaattaaaacgagacaaaagacaaaaacaacacccatatcataaccgtccggcttgctaatcaagccgagatcattaggtatgtagcaataacagtgccaattcagagttattcctgttcccaatatcggagaactcctttagccctagattcgtggtggattttctcgttcttataattcctctccagtttgcttgatccaaaatggtgagacagagacctgtatattatttggatttttctatggtaagccatgtttggcctgttcgtaccacacaggtcgaatttaaccctgaggagcaccctctgagagcaacttctgcctcaatgctgtaggaaagaggttagcaagcgaaaagaaatggtctcgcaaagcaatgcgaatcccggctcctattatccaggtaagggtcgactaactctcttccgtaatgcgcagttgcgagctcttggtctgtacaatcttctccagctcctgcaagtttgcctccagtcccttgaccttctcaccataaaatgcgaccgccttaggcgcagtctggaagaagaaatcatcagcccaatgaacccgatcaccgatatagccctgccgccacataccttctcaacataaaatccagttccgacatcaacaagcaccttctcgcgatccgtcaaccggcccttgacgtacagggagctggtgaggggcacgaggatctcatcacggccatcggttcccatcttctcattcccaatcacgccgtcgttgatcgtgcgcacacagtcgcggaacttggcctgggcggcgcgcagcttcgtgtgcgaggtggtcaggtgttccaattcggaggtgaggcgggtttggagtgcgcggagctgagggatggagagggtggcgaggttgactagtttctggtagttagcatgtatttatcgccatatgacacagatagccggaagcccgcgctgtgtcattctggtgatggggggaccggtgacgcactgccttggggagctccttctgatggggcgttttgtgacattttgggattcggaaagaagaatagggtatggtattaggggggatcgatttccgtgattgttgtgttattgtagatcagatcctcgcattgggaccgtataggtggtggggggagcttcaaaaaactcctgggtcttgttgcgtggtgatagtggggttaagtgttggcaggcggaatagtggacggttgtgtttatacccacgcacttgacatacagcaaagatttgcttattacctcatattgtatgagcgttacaatttgttaaaagaaagctgtcagtatattatccatatattaatatatattaatccattcattcatagctacaagtactctgtaggtaaaatgctatctgcggggaaaaaaagatcactccgaagttctccgctccgctccgtaatccttcttcaccacatatcaatggcgtcgagactggcagcatgtgaagcttgcagaaaggcgaaggtcgcctgtgatcataagcgaccagcatgtactcggtgtgcaagcaacgacagagccgggatctgcatttaccggacgaccccgttcaagagaagaagagcggagagctctacacctctgcagtctcctaggtaggtaatgcatattcatatttgctttactttcacatgcttatcaagtctgcagtcggctaccaccggcccaaccatccttcaccccaaggaataatccctatccaaacccgggctttctggggtcctctagccatgtcgctattttcaacgaaatttccccgcaagactatcatgcatctgatacctaccaagcctccgaggatctcacgatgctgatgcagttgcagtccactggcgagaatatcttgttaatccaaggcgcggatgtcctcagacagctgttcaacacatttccgctagccgccatgaaagattttgttactttttggctggcaacgggagcgaatctagctctggcagagccttttaccgagaagtgtactgaaaatatgacgcgcctgtttacgtccttctcacaggaagataactggcatttggcatatgcccagcgtctgacacaaaactcccgggaacctttgcagtttgacagcacatccgatatggaaagtttctccgcccagtttctcgaccagaaattccgatgggaaagtctaggcatcttcctctctgccgtgagccgagcagcaatcgctataccatttttcccgccattgttcaaaaccgaaaaggataatttcgtgcttcggaagctctctacaagacttagtgatcttgcgttagatattgttctctcgttggattgcttaaacgacctacaactggttctacagtatgagaactttattgtacacacccatgttgatggggatcaaagtaagaactcctcgttgattttgtctgtagaaacccgcagctcacagagaatccaggctatcactcttggagtagacttggaggtgttctgtcgtccatgtttgcccttggctaccatgagaatatcgaaaaaaccaagccaccaattccgacattcctttcggaattacgaaaagcagcttgggccaccacgtactcagccgacaagaatgtggctattttccttggtcggccacctcggatgagcaagcggttctgtcacttccaattgcctttggccccgacaagctcggatcaggttttcaatgcctcacccgttgaggacgaggtcgtcagatggaaaatagatacaccgatctgctacagggcaggtattcggtgggcgaccctttgctccggactgaaagaagatgtcctcgaattgcttcgattaaagcagcgcgagaatttcaatcggaaagctaggtaagttagcgccctccaatgtgggaaccactttctcatcctagtgtttgatatagcgtcattcggcaaaaggctgaaactcaatgggcaaatctaccttctcaattccgactttcgggccctttgaaagaatgttctggggatgcgttcgaacgtgaccttatagctagcatacgcctggaccagctacatgttctctttctacttcaattgtcgtgcctggataccctgactgagcccgatccgtgtatactcgacatctcggatcaaatactctctcttgtagtggacacaatccttctacgagatcaactggtcaactctggaattggactcatttggaaggtatgtctatctactatcaggacttgaaccgttacttactggactgaacacctattagatcgctcacttcggacttccagctacagggatcatcctcctgtcaatgctgaaagaacaccgtacattaacagaaggaagatcctcgtggtctaaaacaatactcaatctcggtatctttgttgcgcaggttcaggtagggagcatcgttcggcgtggagatccgaactacgctttgatatccaaagcgacacagacgattgagcggttccttgattctatacaacgtgaagggatacaatccccgacacagctgtcaccgcagccaggagagaatggtgattgggctgcgtttttcagtcaggatctgtgtgatttcgagactgacttttgggagaacctcgcgtatcatccttctttattgccttcagaccctattttgcctccaatataggattaatacagtaatataaatgcagaatacatggcgaaacctttcatcagttacttaggcatggagttgaaatcactaaaatctcatttaaagaacattatggattattttatcaagtaggataccaaagatatataacgataccaaactctgccattatctatacatcaaatcaccttcggtcctctactatgatttgtgtgctatatcgagacacgccggctgttgttgaatcgtcataagggagatcactcacctatctccaaaccatgctcctcatcttggtcatctggagtgggttcacgggccttaagaaggaaataatctcgcatcgaagaccacacgctactgtctggttcaacagacttattcttgatcttgtaaggcgtaaaactttcacccatccatgcatcaccatcggcgtccagaatttcttcgtcatttgaagacgaatcacttagagtagtgaaggtactccattcaactttctcctttggcaaccgcgaggccttcgatcttttcttttgtggcggagaagtttctccgtccttttcgtcatcgctagtccgcttgcgtttgccttgttcaatagtacttgtggaaataccgaattcagtgcggggcggagatggagcttctgtagtatcagcagtatagaagtcatctgggataggggaatgaatatcttccggtgcaacaaggagacgggagtctggaggagggtcaatgctaggttgaatgaaaggggcagtagggggataaggggaatgatacccaccggaagcccaaaatgtatccttcgtagcagccttgggaacaggactaacaggaaatactggggcagggacaggattcggagaagcaacaggaaatatagtacgattacgagtgcgaaccggggtaaaagtatgaccagaagtaggaacgggggcaagaacaggaacaggaacaggagcaggagaggggacaagagcacgtgcacgagcacgagcacgagtaagacgagcaggagtaggagcaggggcatgggcaggtgtaggggcagggagaagggaaaatccagggccagggcgaggggcaagaccacccgcaggagcagggagagagaaaacttcaaaaataggataattaggatcagtgactctccatgtgggatcagtgaagcggtaaaatcgaagcacatcgaatatacgctcggtaagctccgctgagtctgggacatgagcaagaactacagctggcaactcatgttgcctagcagtaatcctgcgtctgacctcaaatccacagtgacctctgaatgttccgttccaaggtcttccttgttgaagagcattgtacagaatgggattatagatctctttaatcaggtgttgggtggccagtcgatcttgagtattcgtagccatatcgatgccgagtgctgcccaaataggaccctcatggcttgggctcatatttattcttaactctgcggttactcgagccatactggaagatgctgatgagaagtgggtttaatcgaagtcagtattggactgttgggttggattgcaagactgttggcctgtagtggtttagaattcttggaaataatgagacttgagatggaatatatcaactattaagtaccaaaaagctcctttgtaggctattagattgttgtgaatatggtctatgtattttggaagacataaagagacatattcttctcaaagaacactcttttagaacaaagggatgtgtcaataaaataatcggcaattctaaacaaggcctttatgaggtagttaagaatacaagttattgtttctcttcctgtagaaacaaaggaagggaaaaggagaaagtgcccaagaataactacccctgttagaaacaaaaggaaacccacaaaggaaattaggaatgaagctcgaatctgtcttctaagatattgatctataaatggatctctatagaattaaagtaatggcttttgatgaaacggccacctgcgtggttgaaataactgtaggtgatgcttactgaatacctgagttcatcttgtgaagaagctccctaatcgccatcttgccgctacgctgggctatttcaatggccagctcccttttatagttcaacgtaagttataaactacagatcaacagagttaaaagatctcacggggtcgtcagcctctgcttcgagagttgagatctagaaagacatcagcttgacagagccaaacagtatcctctatggtgccgactgctgtgcaacatgtgtttccctggaaacagtctgtagcttcatcattagttcaggtttacgcggctgcagggggtgcctaggtagtgctcggagtgagtctgtgcttattcctcgcctacttaaggcaaacaatgccgctagaccgccacacttgtgttccaatgatgattatggactgaatatgcttttgtaggaacttattcagacaattcatccctaggcgccgattcaaaggatgagcagctatctctgtggtggcttgaaagcaccttttgtctaccttgggtgattcttcgtatctgaaatcagtttcaccggtagtttcgttgggagcgagttggacctttccgttgcctaatacttattctggtcaaggactgtactagtcctttagcatgttggcgcaaactgtatttttcaatctcactccggaacgaactcatgtgcatgaagcaagggatggctccactagactttctgacagggctcacaaaatatcgtaaaaaccaatgttgatataggagatattggtagggtaatgtaagaagacagcgccgaggatcttctaagcccgtcgtggggctgtgtagagggggtttatgcggaacgaagaaggcaaaggcggtcgaacttggtttcaagaaagggaatagacctctgctgtacacagacactttacccctcgttgactaatattcacccacgtgataatcacatggtccatgcggcagtgtcacgtggtaaaaatcaccaatctcggccatgagcttatgtttctaggctaaacgggaccccggacccataattctatattatgtaatattctgaggtacttccataaattctaattctaatatggcgtgtactccctggctctcaataatggcttccgcctaatgaggcatcctctctccgagacattccggatgtctcgtctcttaccgtggttctactattactgattttacagcgcgtctcaagacggtgagcagggcaactgaccccgagggcacgtacccggcggactccaccttggtgtcaaacttctgttagtacggggtacgtgggattcgccagcctccacctatgttgtatattttttagctcataatttaaggtagtattcaattcggtattttacagagtcaaaataatttaatgtttaaatactaccactctaactctcaattttttttttacctaactaacgagggctcccgagcatgacgaacggcctagaatctggctggcatactgtacctaacatgagaaatccagggttatacaatagaggagaggagttagagaaactcaaagcaatacaaaatacacgttcaatactacggactaagattgattagggatatattaggccgatctttgcgccactgaaccctactagggtacgccctgttagggtacgtccattgttgtatacataactacatgtacatatgtaggtgcccacctagttagacgggatacttttcttgataagatatttgtaatagtctggacacggagtagtccgatacatgcagtaaatgtcataagttacaactcgatatctcaacaatggcggtctatatgaacgattcctattagtatcaaatgagtgccacggtccgagaactccgatgacctgcatcctgaatcctgaatcctgaatcctgatgtgaccctgcgcgctatgcccatttatagcttggccgaaatcaccaaccttctttccccgcatagaacttcgacgtggtcgattgaacgacgatggatgattattgccagacttgggctggtttgaaattcggacaactgttttgtactctttacagcctcaatttacggtcttttgctcgatgtcagtggcgccaaaatttaacatcatggcgtcctgtccgtgacttgggcccgggtgctatgatcccgtttgcgtcttagtgctgacgggtggtccaatgtggctattcctcaaacaaagaacaaagccacatgtttcatttgggggctgatctgcagtttcgctcaccccacggggaaaagtttgatctcttttatattctgtggggtagccgaccttccctctacacttttcaaaatccaagatcttctgaatctgaaagctaccaaaaagctccccatcatggatgaaaagtcgtctaagagcgatttccctcactttgagcatgtgctcccagctaagacagagctggatgaggctatcaaccctgatgcacctccgaggcgccaggcgatcggtatcaacatcgttgagaatccgttgacggtaagtcacaactgagagcctctttcatgttcgtgtcggacatgaacactgatcatctttgggtatacagcgcgtctctaaggagcaggctattatcgatgcccggaattatgccgagtcgcataatatgagcgaatatgccgatctgtttgggcgggctgctgtggttgcgcggagccccaaagagttcccatcggctactgagatcgatgaagaggagcgcactgctcttgcatacgagagggaccataaatggcacggctcattcatgctctggtactcaattagtctatgtgctatcggtgctgccacacaaggatgggatcagactggatccaacggagccaacttgtccttccctgaggaattcggaattgccggtaaaggaaaagatgaatggatcgtgggaattgtcaactccatcatcttcttgaccgcaggccttatgtaagttaaagccctgtgatgatcatttttcttctatcttttgcgactgaccttgtacatagtggtgcttggattgttgatccacttaaccactatttgggccggagaggtgagatttttgtcactgctctctgtctcactgccacgcccattggttctggcttcgcaaagtcatggcaaggactcttcgctgcgcgatttgtgatgggaatcggaattggcgcaaagaacgctacagtgcccatttattcagctgagatggctccagccagaattcgaggtgctcttgtcatgttctggcaactttgggtcgtagccggtgagtatctctaatccctcgtcaaggaacatggctaatccctaatgcaggtattttcttgggcttcgctgccaacgttattgtcaaggatgtgaaagatatcgcctggcgtcttcagctcggctccgcattcattccatccttcatccttgccattggcatcttcttctgtcccgagtctcctcgctggcttatgaagcataacaggcacgctgaagcattccagtccatgaagcgcttgcgagctcatccaattattgctgctcgagacttctattattcatacgtgatctacgaggaggaactcaaggagactcggggcgcaggctatttctcacgtctgtgggactgtttcgccgtcccgaggatcagacgggctaactacggtgcctcgactgttatgattgcgcagcaaatgtgcggtatcaatagtaagttgtatctcgtcgcgtgagatggcctagtggtaacacgttttagtcatttctttctacagctcgaccatcttccgggatgtcggttacacagaagaccaggccttgtatgcgtctcttggctacggtgctatccaagttgtggcaactattccaactttgttcctgatcgacaccaaaggccgaagaaccttgactttgatcgtaagccgttccgagatctcttgcggaatatcactaactattgttcttacgaagacattccccctgatgtgcatcttccttttagctggtggtctctctcttttgaacaagacggataatcatggggctatgattgcaccagttgccttgtaagtttggtaattgttttatctgagtacaggctctgattcatatctccgactaggtttgtgtatttgtttactattgcctattccttgggcgaagggccagtcgctttccaatattcagctgaggtattcccgaccattcagcgagaacaaggaatggcgtgggctgtttgtatcaacaacacttttggtaagtatccctacatcaaacctatcgaacattccattgacaaactattctatagctggcatccttagtctaacattccctcggatgatgactgtgatgactcaaactggcgcttgtaagttaatagtcctagaccatgctgttcaaataactgacccttgctctagtcggcttctatgctggtcttaacctcctagcttggtttatgattttctgctttgtcagggagaccaagcagctgactctagaagaattggatcgtacgttaactacggaatctacatgaccatgtactgacatatatcgcagaggtattctcggtgccaaccaagaagtttatccactatgaacttactgtgtggcttccttggtggatcaagcgatacatcttcagacagaatattgaacgaccgccaccaatcattgcactgggcgacggtgtcaggtaaaagctcatacagctctacatactgaagatcttcagactgtgaattttgggttggcaggtctttttttttatcactggtaacttggtctttcattatcctatctctatgaggtagaggagagtgatctacattttaactgaatagttcggtcgttacatacgcaaaatacatttctagtactatgcactgaagcagtgatatcatatacaaataaggaaccaaacttcgcgtgccttcctctcttgcgaaagcactggtatatcaggtcggtgtaggtaaacaaagtcttttggtaggaacgaatcagcccaacttcaaatttgtaaactccgaggtcaagtacaactcatctcaatgcatattcttcgactcgtatttcaatatcccttcattactatcatcatggaccaaacatctgcagaacgtcaaactttcatcgaagccccggatcaagacacagtgaacccagaagcctcaaccgcgaacatacagtctacactggcagatgatcgatttcagtcaacatccaacacctcactaatcccacatcttgaggatgtccatcataacgtctcaaaatcactaagggtcaatgaagatttgatgagttggtcagatgcctggttcccaggggacgagcgactgtgccccttgtggatggggccttggattgaatttcctcaacttcaagaagagatgtggaacgaaattttcaacacgcccgaacttgtcgatgcccgtattttccctccgcaagtcgccgtccgccacgctgctcacatcctagaatggtacatagtgtattcagaggagaccttgaagatatttgcaaacaggtcagtggacgatttcctcgccacgacttttaattttatggaacaagaggacacattgcgatacaggttcagtgtccggggacaattgcgcttcgaccgcccgcgtcattgctgcacctctgttgcgaatttcggattcgaagagccagcatatgcagtcctgtatattccttcatattgtctgactttgcccgaactggttgcagggttgcacgggacatcaccgatggagaccttcgagaagaaaccaactacattcgaggaacatgccacttacgtagtgtctcgtgcgatcgttcggatctattcacggatgatctgctctggacgccggtatgggtatatctacacaggagaggccttggtattccttcaaattcccccggacgacagtagcaatatcaaatactatctatgtgttcccagtcgagacgtcgtttatcatggttatgattcccagtcagaatgggttcgccgtactactttgggccaaatcttcgctttcgcacttcagtctttggctgccagcccaccaacgcaggaatggcaagacgcagtttaccaaacctatcgtgcgcttgataaagatgactcaattctcctgcctcaaaccccggatgccattcgatttagcccgccagcagagtttctatatgagacctcgttctgggttaaattctgggggaatcttctgcttgcagacatacaaataggcgaatatgaaacctctcgttcacagagttctgagttatcagacgtttgcaagccttattgtacccaggcatgcctccttggtacctttcaaaaggatgttctggatcagaactgtccgaatgctgctgcccatggcacagaaagacatcagattacctcacaggagatatgcgacatgatgaatgaacaactccgcgcgaatcggtatagaggattccaacagctgcacatcgttggtcgaacctgttatctgttaaaagcaacgttgctgtctcatggatacacgatgttgatcaaggccaccagctccaagcggtcacacaggatcaatactgagttgaaaaactatcagaatttgcttccattgcagggaagtaagattcctgtatgtcttgggatgttttcgccgaagatcccatattggtatcatggtactaaaatgacctccatgctgctcatcagttggtctggaattcgagcggaccaacataccactcttgaaacgtgtgagtaccttgaacaggagatgcaaaagcttgaagacaaacttaaggaacatggagttgttcagaaagatgcagcttttcgcaatgttttgtggaatcccacatcacaatcttttgtgatggttgacttggaagatttgaagtggctggggagcgagggaagcgaatccaacggaggctcaattcagtccagtgactaccttggagatgtcggcaagtaacctttgattttggcgctcacaaagatattgtgagtaacagttggttgagttggaagaaaaggcaccgcaaaaattctatatttattcccaacgctatctttatgatgcatgccgtcttccttactgtttgtaaagtcccttggacctgtataatatggttgcaataaacccaaaacaaattgatcactccagatcaaaagtctagtcgacatatattagcattggatgataatgagcccacaccacgaataaacataccatatcaaaccaaacaccacctgcaaagttagactgacttttcccctggttcttaaacccaacactctcatagaaattcaccaaatagtcatgcgcaataaggacaaccttgttcgccccgaaagatcctctcccaagatgctcaaggtatgcccggacgagagctcttccaaccctcttgccttgatactccggcgaaatagccacagagtgaattgcaatgttgtcaccatacttgtgattcccaattagttcatcattgacaaagaccggttcaccatccagtgatcgccaattctccggcattgacatcgatccgtcggtgatacgtgaataaggagatcgcactgcaatgacatgtccaatgagtgtaggtgaagctgggtcttgctcattctcaacaaagagtcccaggcatagctccgggcatgctcccaagcgatagcagaacttgtttcgtgttagaggaagcaatcttcggaattgcttatttgcctcagatctggctctggcttaccttttcctcggagcatcgctccggctctataaaggctttctcgacggctacgcagatcttcacgtcttccttgttcagagtccgggtgaaagcattggctcctccgaggctcgggatgtgaatgttggtttggttcatgttgggaggcttggattgactgatgagaacatgcgaacaggttataaattcgaattgaaaacaacaaagatagaaacaattgtttaatgagtcaagggtatttctatatcggtgggtggagtaaaccggagtattcgggccggagtgttcggcgtggatcacctagtggaggacctcaaatgtgaaatccggagaaaaagtggacattggatcttattgatgcattgattagagatgatctgacgctctattagctacaccgctactgtatatcgtggccaatagcaatcattccaggaatcatgttatcggctgtatatctaagctaaatctggggaagaaaaatgctgtcattttttagttgttgtttggcaaaagcctagtcttacatttataggataggagatgagataatgtacagattcacttgctaatattacatactggcgctttcagccattcacagtttggccaacaaggactgaacaaacgtgtggagtccatccaacggcacatcctccttcacgtcgagccgacggcactgcacctccaaagtctgtttcttcttccacccattgccaacaacaataataatagggtacccaatcaagtccgcatctccaagtttccagcccatgcccttgtcccggtcatcaaggatagcatccacaggcgctgcagtgttgccggtaagactatcatacacctgatcggcaacagtctccagccccttccccgagactaccacaacctcgtagggcgcaataacacgcggccaattgagtcccttagaatcggcaagtcggttcgccactgcggagatcatacgcgaaacaccgataccgtgacatcccatctgcataggcacgatctgttccttggcagaagccttcgcacctagatccatatccgaagattcctcgagaagagcggagttgacagacacagacgcgtttagtactttgctgtaccgcgttcccaagtggaatgtgtgtcctagttcaacggcagagtggctagtcagcgatccatccacgcactgcgagcaatggtctccgtcatgaacgcggacaaggctgagtttgtttgaagtctcggggaatcggtccagcttggagtaatctatgtccgaggctgtgcagccaacttcctggagcagatcactgagcggcgggcgctggtatacccgaacctgtgagtcataaagatccaacacacgcggcttatgcgtggaggacttgtttgcctttacgtgggcggtccatcgctctaatgggttctccacgctcaggtcgaggtcaataccagcggcggtcgctactgccttgacggcgtgtgagttgacatgccgctcgacgggctccgtcgcgccattttgcatcgagaatttggggtaccagctccgcacgagggtattgctatcgtgagagatagccatccacatgccagttgagattgttggtccaccttcgacaactgcatcatcggtctggaaaccaggtgtcatggtctcttcggactcctcagcgatgtgcgccttgccgtctgcgagttcttcgttgtaaacatggtcacagtgcgagcagctgaccacctcgtcctcgcccttcggactgatgaagtggtactcatggctcaatgagccgcccatatttcccgagtctgctgccgcgacgaggtaggggatcttgagttcgttaaataattctgtgtaggcatttttgactgcatcatatgttttcattgcttcggtcagactgtagtcgaatgtatagaggtctttcatgacgaactctcgcccacgaagcaggccctgtctgggccgggcctcatctctgtacttccgcgctttacgattctgtcagtgagcttcataaaaatggacaaaaaaagagtctcactgatttgatatacccgcagaggcaggctcttgtatgatgttgtcagattccccacaagtgtagtgatctcctcctcgtgtgttggggccaggagaaaaggagtgtctttccgatcattgaatcggaacagctatgatccatgttagtgacattatgcaatacagtgggtatgatcaacttacttctgagccatcggtcagtctgccagactgtgcccagagctcttgtgaggatattgaggacaatgagaccttggatgcgcctagttttgatttagttgccatcccatgatatagacagggtatattacataccgagcgagcgcatatgcttgtcaatcagacgctctagtttatcttgaacacgtagaccaagtgggagcatatgaaacaccccagagtatgcctggagaccgtcagtgatatttacttgtacataaagatgtgacttctcacctgtcgaaggaatccacctcggactagcaggtcattggcatcctctagatctctgttaacatctggtgatagtcaatccctatcgagtttccgaatggcgtaccattttcaccatcaacgggcttcttggaaattccaccagtaggaatccatatgtttgaaacgcggcttctaccgtcaacctacactgagtcagtactcactgtcaagcacattcaatcaatcttttggaaggacgtacgtgaagattgcattgctgaatgcgcaggctcaaggctagccgccgcccggctatgcgcccggatagaggtcgtagcccagaaatcatcgatcaaggcagcttaaggcgtcgaaattaattattttcgcaattgaaacgctggctgaacacaaaataaattgtagagcaagccgagtctcccttctccgatgtttcttatcgggttggtccgagcgccccgataacgccgcaaaagatttctccgtttaattttctttcctccatcagtcaaccctaaacacaatacaccatggctacagggaaaggaaagcgctcttcgagcgcaaatgagagtgctcccgcgacgagcatctcagctcccgctgccgaacctctgccattcatgccggacgagagtgccttcgcaggtctacgacagaaaatcgaacagcgtttgaagaatcagagtcagaccaccgggaaagggaagaaggacaataacaagccatcggcctcggccaccaatgctttcgcaaataaaggaaagcaatttcccgccaagcccggccgccctcaggattctgcgcaaggcaagaagcgagatcgcaacggcgaggtaattgctcgcgagcagaacaaggatggaatgaacaagcaggaaaagcccaaagctggcaagaagagcaacgatgacgagacattgcgccaagaaattctagctatgggtggtaccgaggaggatcttgatcttcttgccggtgttgagtccgagtctgaggttgagggcgagtctggcaaggttgacgacgatcttcggaaacagctctctagtatgttggaagcttcagggcacgtcgtgcctgaggatctagcggatgacgaagtcgaagaggagatagagagtgaggaggatatcgaggacagcgaagacaatgcagagagcagcgggccagaatctgatattgaggaagcccccgcctcgaagacaaaagagtctgaatctgtggtgccgaaggagtacctgaagctggtaagactgaaccggcctagcaccacaacccttttgctaacatgatcattatagaacgttcttcctcggtccgactggtacaatatccctatgccctcctccgccggcgacacgaaacatatgaacgccttgccccgccacctgatggagcgcgttcacgagctggccaacaaattgctgcaggaagaaaatgaggagtatgcggcggcccagagggcatctgcttcttcttcccacaagttctactcgaccattatgacgtctggtaccctgagtgataaaatttccgccttgactcttaacgttcaagagtcgcccctgcacaacaccaaggcactggagactttgattagtctcggaaagaagcgcagccgtgcgcaggcagttgaagttttgcggtcattaaaggatatgttcgcccagggtaccttgctgcccagcgaccgacgattgaagtctttcactaatcaacctgggctcgtcgccgcattccaaggtgccggtgggcggtggaacgagaaagaccctcttccgggtggtttgaaaaagagcgacctgattgtgtgggcttttgaaaacatcgtaaaagatcaattcttcgaagttattaagattctcgaaatttggtgcaatgacgagatcgaattctcacggacccgggccgtcagttatgtctacgaacttctcaaggagaagcccgagcaggagaccaatcttctgcgacttttggtcaataagcttggtgacccgggcaagaaaattgcgtctcgggcatcatacctgttactacaactgatgcagtcgcatcctatgatgaagccaatcatcatcaagtcagtggaagaagtgctattccggcccggtcagagctcccacgccaagtactatgctgttattactcttaaccagactattttgagactgaaggaagagaaagtggctgctcagctgctggacatttactttggactgttccttgtgcttttgaagccctcccaccagcctaccgatggaaaacctgcccacaagggtaagactgcccccaagggcaaatacaacaagcatggaaagggatcgaagggcaaaggcgacgacgatgctgccaaaggacaggcccaggacgacgaaatgcgggagaagctaatctccggtgtcttgaccggtgtcaaccgtgcttatcctttcactgactctgattccgaacggtatgttttctttacactctactcccctatgcaaggtactaacttctactagcatgtcgaagcacctcgacaccctgttccgtatcacacactcctcgaacttcaacaccagtatccaagctctcatgctgattcaacagctcacggtgtctaaccaagtctccggcgatcgcttctaccgcactctgtacgagtccttgctcgacccccgcgtttccacctcatcaaagcaatctctctacctcaacctcctatacaagtctctcaagaatgatttgaacgtccgccgagtcaaggcatttgtgaagcgtcttgtccaggttcttggcatgcaccaaccttctttcatctgcggtgtcttcttcatgatccgtgagctcgagaagaccttcaccggcctttcatccttggtcgatcagccggaggagaacgacgatgatgatgaagaggtcttccgtgacgtcctcgatgaggacgacgaacagccggaagccgctcctgttgttgaagccaagaagcagaacaacgtgtacgacccccgcaagcgagatcccgagcacagcaatgccgaccggagctgcctttgggaattgctgccttttacttcccacttccatccttccgtgtctcttaacgccacaaatctgcttgagcacaaccccatgagtggcaagccagatctgactctgcacactctcactcacttcctcgaccgcttcgtgtaccgcacgcccaaggccaacgccagctcccgcggtgcttctatcatgcagcccctgggtggtggtgaagccgccgaccggttggtggaggcgggcaagaagacacagaaccaagtgcctctcaacaccgaagccttctggaagaagaaggccaacgatgttgccgcggaggatgtcttcttccacgaatacttcacccgtgtcaataaggacaaggagaaggtgcgttccaagaagagcaaggacgttgatgacgaagacaactccgacgcaggccttagcggagacgaggacgagatctggaaagcgctcgtcgactcccgccccgagctggaagccgacgaggacagcgacgacgacctggacatgtccgatttggaatccgcgttggactccgaagaagatggcgaaggcgcagacgaggacgagtccgacggtggggttatcttcaacgacgagtccgatgttccctccgacgaggaaatggccgagttcagcgaacccgaggaagccgcgcccgccgtcaagaccaagaaggccgccaaaaagccctccaaggaggtcgaggaggactccgacgacttcgatatggacgtatcagacgacgatgcctttatcgacagcgacgaagatctgccctcggatatggaattgggtggagtcggtctggaagagcccgaaaagcccgatgccgcgcccgagtcgaaccgcagcaagcgccgcaagctcaagcagcttcctactttcgcctccgcggacgactacgctgcgctgttggaggacgaggacgacggaatgtaatctgtttcactttgtacaaagagttcgattattccttaccccccgtggggccaaaattcttttttttgcatctggagttgttacaggttgcacacattctgccttactatccctttcattgttatctatatctattctatctactatctattccgcctcgggaccctgcagccaataccagctctttggataatgcctaggaccacccctttctaggcaaaattaggcaaaaataggcaaaaataggcaatgcgatacggcagctgtagcagtccaatcacagcttatggatttgggttcaacaagatcgcaagggatacggagtacgccgtgaccattgaaataaaaatatctcaacgtgtatactaaatatcgcgcatatgtcataacgtaggcaacctttggattgaacacagcgggcatccaaataagctcagatgttttgtgcttataagcgcccgaaaatcactcgacaccatacggagcatatggagtgcgtagtgtggaccttgatgccatcgctgtgggttcgcacgcaagatcggctgctggggccgaaggccagaacgttggatatttaatgcttttttactattttaatgtctcagtattcaacgctttctttgggatgtctgtcagataataatatatatcatatgccacggcattggggctgcatgctccaggcaagggtccctggctagaccatgagtcagcggcacgtggtacgggcgtgtagaaagtgccgatccttccatttgtactccggaggcaaagcgaaatcttcgaaaatgaactccccgagagagatggaccatgtttccactattccatgctgaatcaatgttcgcgagccatatgcgtggattccacttcccgatctggatgaattcattcgaccaagccatccgcatgcggggctagtccaccggacgcatagaataatggacgatatgatatgcgggcgcaaccgactctgcatgagggaagaaagcggattcgggatgcccgtggagcttgggggctcagtaccatggactatgggattcatccagtccagtagtcaggatacatgtagtactttgacttcaggtccagaactgttccttggcacaacccaccgtaagccacggctgatgcttcaactacagaggctgatcttggctctggcaacgtcatatctctacatttcgcctagtagctgaattttgattttgaatttcttttttactttccggatgttaaaggctgtggagtcggaaatgacggtgttctccagataaccatagaagtaccatgcgctgggatcgcaatacccgatatgctgctatactaacgtcaaggttctttttttttcttttttatttctctttccccctttccctctcttccctccattcatatttccactcttcgtttcagttgagaattgcatgcagctcagcgaataccacctcaggtacccgcatttgccctaatccgtccagcacggatcgcttcttccaactggccgatcacccaggacttgttcatttcatttgagtgtaagtgtctgattcatctgttcaaatagaagaaacgataaacacaaaagaacaaaattcgctcacacgcgaccagtatcctatttatcatcttctcgagcattgcatgcatctgcgcatactcaactctcttgactccaccgagttccgacaaagtcgcggttcgtccgctctcttaaataaaaatgactggtccgaaagaatcgccaaatcttgctcctgtgggctgggactatgaccggaaccacaatggcaccgagttgtctgatatgtccgagcaagagcccaagctgaaggacttcgacatcgagagccagccccgccgcggctcgcagcataatgtcactgccatcgactcattgtcgatgaaggaaagtatcggtcgtcagattgacatcgagtcggagaacacaattaaataccggacgtgcagttggcaaaaggtgcgcttcggaccgatacggatattagaggcttgactaataaatttttacagaccgctgcattgctcttctcggagtatatctgtctggctattatgtcctttccctggtcatactcaattctgggtctggttcccggtttgatcctgaccgtggttattgccgccattgtcctgtacacttcattgattacctggtatgatatccctaacagccgcgaccacatgataagcctcggtgttaatatttgtataggagattctgtctgcgacacccggaagtccgcgatgtttgcgacatcggtcagtatctgttctgggactccaagattgcgtggtgggccacagcattcatgttcctcctgaacaacactttcattcagggcctgcactgtgtggtgggtgccgagtacttgaacacgatgtcaaacggtgcagtatgcacaattgtcttctcaataatcgtcgccatcatttcctggtgtttctcgctgccccgcacattcgacacgttatccaaagtcgcaaccctctcagcattttttaccttcgtctccgtcgtcctggctgccgtatttgctggtgtcgaagaccatccggcaggatacacgcccgcactgggagaccccaccgtgcttgccgtcccgctcaagggcacaacatttatccaaggcatgaatgcctttttgaacattagctacaccttcatcggccaaatcaccctccccagtttcattgccgagatgaaagagccccgcgacttctggaagtcagtaacagccgtgacaatcgcggagatcatcgtcttcagcgtcatcggtgcagtcacatacgtctacgtcggcaaccaatacatggttgcgccggccttcggttccctcggcgacgacgtttacaagaaggtctccttctctttcatgataccgaccatcattttcctgggcgtgctgtacgcctccgtctcggcccgtttcatcttcttccgcctattcgagggcacccggcacaagggcaacaacaccgtcattggctgggctgcttggggtggaatccttgctgcgctttgggtcgcagcctttatcattgccgaagtcattcccttcttctccgacttgttgtccattatgagcgccctctttgactctttcttcggcttcattttttggggtaccgcttatatccgcatgcgctcggaggattacggaccccgtttctttatggttcgtggaattcgaggctggctcggattcatttttaacgtctttttgattgttgttggtttcttcttcttgggacctgggacatacgtaagtgatgagtccttgtttggcttggcttgttggtatttcttatgctcctgctaacacatattccttctaggctgctgttatgtccgtcgtcaccagctacgatgagggcactgttcgcggcgttttcacgtgtgccagcaatggactataaaccccctgcagggcggggggtttgtaaaaagttttgtcttcatcttggcattgaatctgttgtgtacgttgtttccaatacaccgggtcattgactccggtgatttcatgactgatgaccgagaagggaagtggtcgatatacacatacgacttgaccacgtttggggtatagaactgtttttcggatggacgcggatggatttcaatgctgtgtatagcttcatggaaagggacgggttttgggatatgctccccttatgtgtatattttatccctgcattctttacagcagttgcacctttcaattcaatgcagatggtcggcctagaggttgcaatttcgctctccgggtttgatttgacatcgccgcggcaatactccgatggccttttggtctaccaatcaatgtagccatgaacctcaattgccttcggcgcaaggtgtggacgataattcgccgataatacttcaatggctagcctcttatatgttgaaacagaccagcgatataacctacagtctgcaagaagtgtacgtccaaattgggcaatcagctaatccccgatcgcctatcaacacgtgactttcccgctcggcttccccgacggcgaattggtgacttctagcagctcatttctttctcttcttctcttttcttttgtcaattcaattcttcagcattgattcaccatgtcaagcgtccgtattctcacacgaggtgttgacctcgccgccgcgagggccgctacccttaaccttccccgcgcctctatcggctccaccgtacttcggcgagagctctcctccgcggctatcgtacgaccaacagtccgtcgatcattgaaagccaatgcactagtcacagacgtagcttcacgtgctgcgaaccaggccgtgcggtatgcctctagctccagcgagcccctcagcaagacacagctctatgacttgcacctggagcacggtgctaagatggtgccctttgccgggttcgacatgcctttgcagtacgcggacctgagccatgtggaaagccacatgtggactcgcgagaaggccagtcttttcgatgttagccacatgtaagtgaatcatctccgagccaaaacaaaccgcaatggctaaccaagttcctcacctagggttcagcatcaactcagcggccccggagccattgatctcctgaagaaggtgactccttcgtcagtagacaagttagctccgaacagctctaccctctcctgcctccttgaagaaggcaccggtggtattgtcgacgactgcgttatcacccgccgcggcgaagacagcttctacttcgttacgaacgccggccgccgcgcagaggatttggcctttctgagcgccgagatcgacgcctaccgctccaagcacggagccgacagcatcaagtgggagatcctcgctgaccgcgcgctggtcgcgctgcaaggacccctcgccgcctctgtccttcaacccctcatcaacaccgcaaacactccctcctccgaaaccgacctgagcaccctctacttcggcaattgccgcgagctgtacctcaccctcccagacggcagcgcaactgcacacccactcctcatctcccgcaccggctacaccggcgaagacggcttcgagatctccatcccgacctccggcgccccatccctaccccgacaagtcaccgagctccttctcaccgacagcagcaaatctcgtctcgccggtctggcagcccgtgactccctccgtctcgaggcaggcatgtgtctctacggacacgacatcaccactgcgcaaaccccgcccgccgcagcccttggctggatcgtcggccgtgatcgtcgcgatcctgtatctgctaccttcaacggcgcttccgttatcctctcccaactcgccagcccgaagactatcccccagcgccgcgtcggattaactgttgagaaggggcccccagctcgcgagggcgctctcgtccttgatatctctgacccggcgaatcctgtcgaagtcggcgttatcacttccggcctgcccagtccgtcgcttggcggtgccaatattgctatggggtatgtcaaccaagggcttcacaaaaagggtaccgagctggctgttaaggtccgcaataaggtccgcaaggctactgtcgtcggtatgccttggattaccagcaagttccaccgtcctcctcagtagagggtagaaggtgtcgacaactcctctaattttatattggttttgttcctttcttaaatgcagggactcatgcgaaatactagcgttttgatttattatttggcctttgtatatatgtttccgatcttatgactgatattcatcacatcaaaatattcttttctttcttgtcatagttcacacaaatttgtatcatgactatcatttttcaatgcctacagagtcacaatcaacctaccaagtcaacatgattatcaagatgcaaagcaccaagctgcccactttcaacaacactctcccacctacgataattcacatcctcatccccaccaccactcccagcctccggcgccaaagaaggcggtaaatcctccagtccagtcccccaagcactctcctccttcccaagaacaagaaccaactccctcccctcagcgaagaaatcatgcccaatccaattccgcgtataaggcacgccatccagggtcgcagactgaataaagccattcccacccgcggcagcgccagtagcattagccgtgttatactccgcccaattcaccgtgcgcagcgttgccgttttccccgtcagcggggagacaatactgacagactcgaagaacggcactgtgaggaggtacacgctctgtcctgggttcgggaatagtcccatcatcgccatggcgacgaacgagcccatggcgcctgagtcgtcgttgcctgggagtccggctggcgttggcgagaagtagtctgggatgtaggcgcgcacgcgggaggtggattttgctggacggccggcgtagtggtattggaagacggttaggaaggcgggctcgttgccgatgtaggttatgtttcggtcgtggaggtagtcgaggcgggtgacgaagtttgtggggccgccgagaagggttattagggtttgcatgtcgtgggggacgaagctgggatagttagaaggggtgggaataaaggtcttcatttgttgggggaagcgggcttacaattgatactcccagatgctggattcgaaggtttcgcccgcggtgttttgcagtgagcaggcgtgtccgctctcgtcgatgttcgagcacgcgaggggatcttggacgccccatgttccattaatatgctttggctggaagaaaccagtgaagccagtgtcccttcctctccagaaagaggcctggtttggtttgaataagttttgccagtatcgtgatcttttctcgtaccgctctgcatcggccgtcttgttcatgcctcgagccatttgcgcgatggcgaagtcgttgtaggaatactcgagtgtgcgtgagacgctgcgcgtcattgtgccgaacccttcgtagtcgaagtcttccacagggatataatgtaactctttccagctgcgtagaccgccacggccttcgctggaccagtcgtacggttcctcctcagcgtccttttgcacagctgcatacccggcatcccaatcaatgccatctctgagacctttcaggtagacatctgccaggacattgtcggcattagaaccgccttgtgtatatcctttgcatagtgacatgcggcagtccggcagccagcctaggtggcgctgggtatcgatgagtgatcgcaccatttgcattaccgaggaaggatcgaagatagtgaggaatgggatctgggaacggaaagaatcccaaagacaatagaacgaatcaaagtaaggctcactgctctgccagagcgggttctcgcctgtgtagttctgggggttgatcatagtcctatagattccactgtagaaattggacagaacggatgaatcgatgtttgttcgtgagacacggatcgggcgcatcttctcggtccatttttcgactgctatctggtgggttgcgttgaagtcaaagtttggaatctcagactctgcatgagcgcacgcttgctctgtgctcatgaagctgacgccaactcgagcgaggaccgtgttgtctgcggcggactcaaagcggacaaatccaccaccctacggaatgtcaatccttgtctctatataaaagaaagggtttcgactcactggaagcgggtacccattgatactgcgggagattttcaaatcatgaacatcagcactggcacgagaattgacaaagatgccactatctcgctgggctgcagggcttttgaagtccgcacagaaatgtaacatgtacgatcccgatccaaagctaggagcgaacctcgcatcaccggtcattcgatttgttgtgttatccaccgagatagtcgcattgtcctggcgggagttcgacagatcggtaaggtccagcaaaatcaatggactggtggtgttatcacttgggaactggaagcgaaacagagacgtatggtgcgcagttgtcatatccactcggacccctgatgccagctctatagcaaagtatcccggacgcgcctgcacggagtcgggcttatacttcgttttccgttggttcttcggatagacacagccattgacatcatcgccggcgcattttgcatagggaaagagagggaaattccctaacgaaggactgccgccagtgccggagtcgtgcatgctggagaatccggtgacgctgccgccctcgtgggcgaaacctccttggttgctttctgagtctgtatcggcgacggctttcgccatgccatatggaagcgaggctcctggaaagacatttcctgtggagaattggtcagtagcatgaatttgactgatttagctgttgaacttacctccgttggcactaccaatcaagggattgatgtattgtagaacatcataatcttccaatagaggggtgtctgcggcattaactaggatgcgactggttgaaaataacgacagtaacaaatatggcagcatgatctaggttgaataaagatgatcgacgcgtcggaaaggctagtatttaggtaacccttcatccgcaactgcctggaatgcgtgcccctggcgatccctgtctgttacattacattctgcatattcccgtatgtggatccggggataggctctcatgttttcgagagtatgtagtgcaaggatgtactggaggttgattggtgagactcgtgtgtccggaacgttaggattgagaaacagtccaagacaagcgagattaatctagtaagactttgccgcaataggcttcatgagtattcatcaaaagcctaatttcttgcaagcatactcaaaggaagaaagatagcatatttcgccaaaggtaggtctcattctggcaaaagaataagacagaaagcatcgtgtcttcacctggctatgccgatttatcaagtaaagagagctgtatatatatattggccgcatccaccatcgtgtttcgccatattcttcttttgtatccccggataccggcttccacgacaacatttatagcaatttgtccgaccttgccataccaaacagcgtaactcggactcccggttagcatctgttctctttaagctttctcggggtatgatcatagcttagtgctttcctccttcgtcaactgcattggcgggacaccggtatcgtgttcccaaaccaacttgtcaatgcgcccattgtcgttgcattcaaacacggctttccagaaaggtgccgcttggtcccagcccacccagcggccacgtctagataactcgttccgtggaagtaaccaagtgaaggtgtcatcttcatagtgttcaagttggaacttttctgactccagcccttgcagcctccagtaaagcttgttgtccaccaaattcacaacaatcttgaacacattgatattatcccagtaagtaccgacatactcctctagtgctctaggtgatgttccgttctttcgagccgagcctagctctcccaccagtgctggataccacttcaagctctcagcgaccgagatgtgggctgcttcgatgtaatcatttctctctgattctggaacctcgagcagctcttcaaggatgagttggccaacccagtcaggaacatcatttagggccaaagagttagacagtacaacaataacactgtcagtgtctggaagtagaatcacaattgcgagggcgccaggtaggctgccctggtggaagagaatgagctgtgagggaacgcctttcccaacggtaggcatgccattggacatcagaccaggattgattccgatatgacctagccgattgggaagctgggctctgacccatccgagtgcgtatgatagctcgttcctcgagggttgatgcataggaattttggcggaagtgagatgagaaacttgtttgaagggagagtctttggtcgctcccttcccggtgatgaattgatcttcaaagctagcggtgaacgttttgtataactccaaaagatcacggatacaggaccacgcgccaccacttggtccaccgaaccaatcttggcctcccttagggtaaggaataggagtagtggatccatcatcaagtgcgttgtagcactgagtgacattttgggtgcccggaggtggagatttaaggtaggttcgatccaagccgagaggatcgagaatacggctctgtacaaactcaaaccacgaaatgccactgacttcctcgatgacataacctgcaaggttatattgaagattgttataggacattcctgtccggaacggaagaacccgcggctgtgaattgatgtatttcagtccatcctttcctggaatgagaacgttgttctcggtaccgaggaccacattaccagcccaagccatgcctgatcgatgagataggatgtccgtgatagtcaagtgattctgcagcgtctcgtcgcttgaatcaaaggatggaagaacgtccttcactagtgtatcccaggtgagtttaccctcgtcgacaagaatcgccatcgcagaggcagtcaaagcctttgtcaacgaacatatgggaaatattgtttcctcagtgacgggtagaccagctgctgtgtctcggacgccaaaacttgactcgtaaacagtgtttccgctcgacatgactgcgagcgagagccctggggtcccgccgatgcgcatcaaatcttcgatggtggaccgcaagcgatccagtcgttccgggagttctgccattctgaatgctgctcgggataatgcgaccgttacggagtagagtgaggaggtcgactaagatagattgtgtagagggggtgcaatcgcgactatgaaatgattggctattcctatagttatacccgcttttcccaccaccctacaatacaacatagtctccttatcaagtcagctgatctgataccatgaagctatttagagattacatgatcacctgatctgtcactatgaagtaattgaaattaattctaccaccattaatgatagagataatttaactctggaaatgacaattgaatgctggatggtagacaatatataattgattaaatgcgaccggtatttaatgctagctatagcttgattgtacaaagaagttgaggtaaggactcagcggggtgtggcagttttcaacaactaccagcgcgggacaggggaatacgagagaatcaccaatcagaatgcgacaaagttcgagcatagaaaaggaacaccggggggggggggggggggggggggatcccgcccccccccccctggctcnnnnnnnnnnnnnnnnnnnnnnnnnnnnnnnnnnnnnnnnnnnnnnnnnnnnnnnnnnnnnnnnnnnnnnnnnnnnnnnnnnnnnnnnnnnnnnnnnnnnnnnnnnnnnnnnnnnnnnnnnnnnnnnnnnnnnnnnnnnnnnnnnnnnnnnnnnnnnnnnnnnnnnnnnnnngggggggggcatggatcgctgccacccgtccctgagtccaaacaagaagcctttttaatcactgaaaagaaagctgagatgatctacaaccccatgttcttcttctttgcctcccggtaatcgactcacaacctcagccggcttctcaagactaagctccacaatcttctcgttcccagagagcttccacgagatcatagctagattatccttacccagcgccaccttcgcttccaacgcttctgccaaccgtagcctgggcctgaaaaatatcttcgatgagccagcagcgaccggctgaacacctgccagctcagtacagtactcataaattggcacactcccccaagcatggcaatcagacctttgtctaacgtcgtcctcctcccaagtagaaagattattcgctagcatcccccgccacggagcccacattctctcccaaaacgactcgtacaaatcctcgccagccaaagaaaatgccctgaatgcatagaaccgcatcatatacgaacaccttgagaagcgatcattggtaaacgattcagtcaagatccgtgcagagtcttctgcccttgccgctccacaaataacagcgaagacctgacagtgctgagaatacgacagctcatcggcaacatcggctgtcgagtcggtgaagaattgcccatcataacaatgagcccgaatagcccctagaagcgatgccgccctcgcttcatactcagcagcatgtcctggccgaccaacatcacgcaccagaccagcaacattttgtagaacccacgcgtacaacatactaaaataagtgtgtctattggattttcgtccggaggtcggaactcctttgtcgggatggtcgtccgttgcaccccaggtcgtcacccagtcaacatattgccagacgacttcaggcagtccgctgaccagacccagctcgtcgatgtgggcatcgaaaaagtcgagaataccgtcgatacgcgggatgaagcctcgcgcgaagcgggtatcgccgaagtataggtggtggtcgcagacctgcaagacccaatacagcgagaacccagctatgagttgcggtatttgtgaggggaagcgggactgtgtgagaccttcgggtgtgattgaggctgcaaagtttgtaattgcttggcgcatcagtcggtcgtcgcccgagaggaggtagtggaatagaccaacggagcggctgtctccggagtatctgaattgttagctggggtatggatttggggatgtatgaggcatactgtaattgttcgtagaatgggcaatcggaatacccgtcgaacatgcagtttcgcattgtccggatggaaacggcccagatctgctcgctgtgcgcgtctccgggctctttccagctggctttgacggccatggggtagttgacctgagtagcggcaaatgataccagctcgattggctcggggcctacagtgatttcgatcctcagaagacgaaaggttcggaaccaaaatggttcgtatatgacactttcagtgtcaggaagattaagtgtcacttcatcgtatggtccgataatgtggccaacacttgcattcagccggtcagccttggagcggaagaaagggtatgatcgaggctcaagctcatagccttctgagtgtgtcactttgagtctgatctgagaagtgtgtttggctgctttgaaggcccatcgaaggaatgcagtcgaatggacatcggcttgcacttcaagtgtatgagttgagcttgcaggaaggacgatagagtggtttgttgcgaagaaggctgtccaatctctgacctcgatcacactgtggcatgctctaatggtttttacaacggctggggttgactcgggcatggggatagagcgtggacgtagattccacggcggaatatcgccattgagggtctttatcttgtaggcaaatggtaccaccgcaggaccggggtttgtaggaacaacgcgctcgctgatctgagaaagaatgtcagtgcaattcaagagggcttcgatcctgagccattctcacatgaaggaacacatcgtcagccaatcctgtcggaaactcaatgctttcatccgcagatgctctccaattcttggaagaagcaagatcgacgaccccctcgtctgtctcgatatttccaataactgtcaagcctggaagagccgtccgcgcaaagggtattgcgctcctcgaagtcgcgaagtaccggacaaccgtaaatcgaatctcattttgtccttcttgcaggtagggtgcaatgtccagcgtgtcgtaataccagatcaaaggactgctgcgactcggtccgacggcaatatgtttcccgttcacatagagcttgtagcgtgtatcggctgagaaatgcagtattgatttcgtcggtcgcgacgacaagataacattccgtgtaaagtgaactatcttgccagctgtgttcgcgtttgaagagtcagtccaatttggaacccagatccagttagcctgaagctcgtcgattgtctttcaagccacaataagtcagcaatttattccatatagcttgagatataaggaaaataccttttgctcctctgttgagaccatctttgcgcattgtttccgttcatctcgggagttccgacgagtttgtataacttccggcggggaagaggccgggggttcggaacatctcacaacgagaagaaacgcgattgaattaaattagctaataagagtttgcaaataatagcttttaggctggggggatgtattcagccaatagttcatgaaaccgaagatgttgaggattctatcacaataatatatagaagtcgtctcttcgccgactaagggagaggaggtatttaaaaagacataacaaggtcgtataaggggtttaccattcttgtatagtttaatttaagtataacgatataaccataatgtagtatcgcttacacttaagctgcgactacctcatactcctcgcagctgcacttcagtgacataacccttgaacttccgaagattgaccttcttctcgaacctagaacataaaacgtgttatccaaatccattaaaaggaccccaggtggaaggttgacatacatctcatcaatctcagccggtgttcggcgtgtcacctctggaagaatgaaccaggcgataattactgcaagtgtgcctgtacccgcaaagctataagaggtaggctgtcagcattttgcagtggcaacccgcacttaaagaagacggcaaaagactgacaagaaaccagtttttacaccccagtgtgagataggcgcattgttgatcatcaagggcgtgcagaaactgaacatgatagcgactaaattcgaggatgcaagagcccagccggctgtttttgcgcgcaaacgttgctgggggatctcagcggcgtaggcatagccaatagccgacgcaccagtagtagacaaagttgccaaacaagcgaaaaagatctaggtacagttagcaagttatccaaggttacgccgtcagaagggcttgccagaagtgagctggttgatggcttggtgtaatcgaagcagccaataattccgaggcataaaactgacacagatgtaactgcataggggtagattgtcaacggacgacgaccaagcttgtccgtcgtggcagcagtcataatcatagatatcaactggacacaagataaaatgaccgttaccgtgaatgggtctttgttgccagcatattgaactagaacgatattagcaaagtgaaagaacagtatgaaacgattagtactcacagaaatatgtagcgtaggtgttaaacacagacaaaccgacaagctgctgggcaatcttgggccaagctgcaataaagaaacgaatccgattgcgaccctggaaaacagcccatggtccctcttcggagttacgctctgcgacggtgcgctcctctgcaatggtggcagtcatgatttcctgataggaaattagaactttgttgaaatacgattgacagaataatcacatacaatctgctcgtcaacgctgtattcctcgatattgccattgcaccgagttaggatcttggctgccttgtcgagccttcctttgctcacgagccaccagggagattctgggatgaaggcgaagatgatggcaatgataccaaccatagcccactgaccgttcatggcaattgtcagtcactatcttgaccatgaaagctaaatcacacacgggacaccacgaacctgtgtatagatagggactcggaattcatatgagttatttgcgctgagttccttgagtgccactgacgcgaagatctgaccaaccacaaaccagctggaaaagaatcagcatataaagcctctgaggtgcaatcctcttaactcacaaactgtacgcgttgatatagaaacctcgcagctgagttggggcgatttcggacaagtagagaggtaacgtggattgcagcataccgacacccattccagagaagagttttgctgcgagccagtgatcccatcttgttgcgaaagattcaataaacacgctgatgacaatgtcgagccagattatatagaacgcgatttttcgaccgaacttctctgtggcatattggaggaactaaagagtagttagacactcgccagattagccctgaagatcggaaagacgtacaacttgaccgatagtttgaccggcggattggataccaccccatgcggagatgtatttgcctgcaatgatggatgtgcctggggaagccatctgtcgaataaaacccttgttggagacaataccgccattaagattaatttctgcaaacagatcagtataattagaagctcataggtctccaaaagcagtagcttacggtaaccatccagcgatgcgctaaatgccgcggtcatagcaatcagcgagacgatcttgaaccgtcgcacacaatgccagacaccaaggtcgtcttcgcgagatcgcatgatgggccccatgctcttggtaggcatgacattttcttgatgggagaaggcatcctcgatgttttcagtgttggtcttggaactatccatcgtaaaaataagtagacaacagtgtgtaccgagaacgaaagttgtaagttcttgtcaaatgaacatgagtagctggtattgctatattatcagctctttggtccaacttagagagctaacaaatattgatttgcgaaggactcagctattccaaccaataaatctgaatttacaaggctaaacgtaattcttagaagctctttgttcttactttaccccagattatacatcaaatatacgaaaaaattgactatcgaatagaacgcaacccaagggcctctacccctcaaactcccactagccctaaacagagaatccccggcggcataacgcccataggagggaattcaacccctccaaattccatacatccccaaccttcggggttttcggaggaagactgcccgagctccttcccggggaactaaggccgagtaattacaggtaaaccagaagagcttccgaagctgcaacagtgaaggttgctttcccgccagagacagtgactgtctctatgctctctataccctgaataatgcaagtgccgttggcaaatgtctggcccgcaacggtcgggttctgaccttgatcgacccgagacgtagcatagggagcagtcagccgtttagcagtaacgcctgaggaaaaaagcccagacagtgtatatatttgcgaggaccgtgttccgctggtagatatatagtagtcggaattgtagagaaggacccggacaggaacgctagccttgtagagggcgtaggctgcatatgctgtatcttggctatccagaggcgcaatctggtcggcgttggcgagcgccatgctggcgaagtaagcaccgtagtaaggggatcctatgtcgtagcggccccaccagcagtattggccttgaaagttagcttgtgggtgggtaagaagttctagataacttacagtttccaacggtaccctggtggaagtagagggcatttgtgcccatgaggacggtctgcatcacgtagtccaagatccagagcgcagcaccaaaagtcgggctgataccaccaccgccttgggttgctgaatatttttagtatttttatcaagtgacagtgagcagtaacgtacccgagttagtctcgccgaagatatgcggtttgcctttttcagcagctgcagaaacttcagtagcataaggcttgatctgggtggcaatactgctgtggcccataagagtagcaaggtcgtaggagccagatgactggggatagttgtgagagcaataatccttcacatagtcattcgcatcactctctttcgcggtaaggctagcgaggctcatgggcgaagtgccaaagtagacacctgctgagatgatatcagttgcagagagatttccgcacatcgcatcttgccaggtgacttgggatgattcatcagctgcagctgtccaggatgcaccattggcaataggatcgctgtcaacgaaaactgaacgcttaattagcgtctacacaaccaagaataagtaatttgagacctacagctgggctcattccccagttcaatggagtatagattgttcattttgctctgggcgagaagcgcggccgaaattgtgttcaagatatcgcccaaacgacgattcaatccaattataacttctccggcatagcctgcagccaaagagatgaaggacggtccgtaagtcagagtctcgggcgcagcacctgtgctggccactgtataagtgacagcttccgttgatgagctattgtatatcgcgcggtccctgcgtactgttaacaacatttattgaccaataaaagcatacatactgtgttgtgcctccgatccgcataggaggccatgttcctgtcagatccttgaggttctgcagacatgtcattgttgattcgacctcttgaatgtactcagggaacgcaaagaactccagacttcacggtgagtaattaaatctgccaatggcttagatagagactcacgatacaccaactggagctgcagagagctgctggctagaatttgaaggcggggatatcggaacattgaagctcaaactcaaagccgaagccgcgaggcctagaagcaaggctgagatgggaattgatgtcatggcctcaaaatgtcttccgtcgatgctagataaattgagttgtaagccaaagaaatttccaagacaagataaaggtcttgagtatacatatataggctataatgcaatccggtctctataaggaaacaatccggggaaccccacatttcattattttcaatcttactgtcgggttttagaatactcgtgctggtaaatatcaaggagcaattgaggataatataattgattgaaaaattactgcttcttttcccgttaaaatgaacaagggaagtcctgtactttgtatttcacagacttcctgtggtagcccaatatacattataattgtatccctgggcatcatagaaagggctcagtgtaacatgtcctccatcggcgatggagatgaagtcaagaccagaagcgccggagcgtttgatagagtcaagggcgagagtaggaatactactcagcgtttggtttccgtaattgccgcacaagatagttggcccataagcaactgcagcaatacttgaattgtcatttgcagccactgtacgcagactcatgggaaagcggatcacaacgacatctccatcggcccatatacgcgagatctgagcgtaagttccgggactagccttaacatcaggtacagcttttccattcagcgtcagctctgcgcttgatgcccatgtagggatgcggatattcatcgtccagtgaccactgccgaagacttctagtttcgatttatccccgactgggtaagtcgtagactgtttcagggtaatacccatctccggccatttcaggacagaagacatgaacaagttgacaaacaacgtggagtcattgtagaagtagatcgagtccatcaactttgtgttcgtttcgattgctgttccttgacagcaccagaatgagtcgtagtccgtactccaagtaccgccaccccaggcgggaccaacaccacggcgacctccggcgttgagaggagtgaagtaagtgatgtggccatggtgatcataagggttctgttggcccaacaggtggttgagtaaggcgttttcgtagaagtcgaaatatgccgagttctcggaatcaacgagccacagctcgcgagtcagcttgagcatattataggaattacatgcttcacatgtatcattgtcaagataatcggcgatcgcatttggggcatggaagtgttcggcttggctgttaccaccgattgcgtacgtgtgcgatttgacatttatttcccaggcattccgggcaatatcaaggtagcgagattgtccggtggctttgtattcgcgagcggccccaatccactttggtacttgagtgtttgcatgtagaccgtcgaactcatctatgtcggctgcaagggggtcaaatataacgccatgatcaaagcgttgggcaacggtaagccatctcttgtcaccggtttggtggtagaggtcagccatcacttcattcataccgccgaattctgtttgtaacaacttttgcattgcatcgtaactcaacggttcggtgcgtttgtcgacccagctggctaaggacagtaagacgtctcgagatatagtgtcttttgtcaagcgccagatgtcaaggaggcctgcaagagtcttgtgtaccgcgtaatacgggacattgccgtttgtcagggtgctgttttcgagttttgcaaactctgattctggaaagccagatacatatccgtccgtgaagccagcagccttgttgttagcctggcatttggccagctcggcaacaaagtaggtcgctcgatcataacatgtttggtcgcggagtaccgcataacattgagcccaggcactgaggaaatgaccctggatatgcgaacggaacggaaaatccggagcatcccagccaccattaggcgttgcttgttttgtggataatccgtgggtcacccggaagacgtagagtagtctgtcgacgtctatttctttcaaatatctcagggtccggccttggttttccaggaagcggtcttgtgtcaattggactccaccaagatcgaatgcaaacgcctgagctccaacatccttggtatttgagctggattgtccatcgacgggaaagggaagagaaagaaaaaagcagacgaatatagcgagaggtttccaccaatccttggagtgtatcattttgaattgtttgggcgaattgaaagtctggtagataacctagtgattcagctattctttaggcattgtctgaaacacaaggcccttttatataagatatttccggtgggataagacattaatcgcattgttgtatatacaatgccaaggatctccacacaagtccatactccgcaccccatacttcttctcaaatccggagaattcatgcggggatatattttgcggagaaatgccaccggactcattcatagtcttctaaaggaaatatgccggggggcttgtagatcaatttacccttaagagcggagaatatcaaaggtcaactaaactttacaagagatctctagcctactataattctaagccaatcctaaaagacagattaaatctgatagactacaagttgatatctctcaatagagtagtctgcgcgaagatttcttatactttcatgcttgtttataggtgatatctagtctctttggcgaggttgaagaaagttcgtggcattgtgattgcgatatacatgcataggtctggctttaagcaatataattattatcattcaatgataagaacgaagcgtttcgatttgcttgcaagtgataatgttgagaagacctattattagctaccaagtgacactaaatcaaataacaccgtggctgttgagatatggggttgccacgttactatgttgtcttgttccggagtatgtacacatgtgtgtatttcgattccgaagtatagagtcagagaaacaataagagatcccatgtagttttaagtcttaataccctaatcaaatataagtctcaacctccgaagaggatgtttcggcgaagtcaagatgccgaggtaaatctcaccgaaatccacttcgccttatcctcaaccactgttttctcaacaacttcgccttctagatctctaaatttggatcgtttgctttaattgttttttcgctctttataatttatgatgttccgctcttttacttctcttcctcactcttttcgcaatatttccctcccctccacgctctctccctcacgactggtattccgcaactctctacccgcaactcccgctgctccgaagcgattccatagccggtcttactctaccggtaagttataaacagtccgcgtcctccaaaaggagctaacccggtaatcgtagcaagtccctcggcctctatctatccacccccaccccaccaaaaccagcgctctcgtctccgccgctttatcgggttcaccacgatcgctgtcttcacattcaccatcgggcttacctatcaaacccaacgcaccctctcacgcatcatggcgaccccaaatgacgaggaggtcctgaccgcattccttgacaccgactccgagatcacggagatcgagaacacaatccgcactcaccccgtcgcagaggccctccgcgcagaccccgacttcagcgaatcgcgcccacaccttacaatcccgggccctctgcgcgaacgcaacctgacagccggaacgctagcaggacccggcaagattgtcgtgccgccatatgtattcagcgagcgcgagggcaagaccatgatctcgctcatgtatctcggcggcgatgtctgcggtcaccagggtattattcacggtggtctactggctacactgttggacgagggtctggcgcgttgttgcttccccgctctacctaataaggtcggcgttaccgccaatctgaacattgattaccgtgctccggctatggcgaatcagtatgtcgccctccgcgcggagactgttaaggtcgagggtcgcaaggcgtgggtggaaggtcgtattgagactctcccgattgatggttcggagcctgtggtcctagttgaggctaaggctttgttcattgagccccgacaagctgctgtaagttgaaaatgttggactttgatcttttcccctgactaatttccccaggcgctctcgagtctctacaaggtggcgtgattgggaaatttctgtcctttccgaaatttctgcatttggttctcgttcctggttcctggcgtaatggcgaattaagagaattagacctttcatatgtaaatggtattagaattgagtgaagaaatgaatattatcagtaatatcaaagactatacaagattacaagactataagactataagactatactatagaatatctctgttgtacagagtataagaacggaaaaacgccaagcaatggcgacaccccgcggtgatcacatcttcttctgtgacgcggccgtcccactgcccctccctatttctataacttttccgggatctcaactttcttctttctttaatccaattaacctccaaaatgtcttcgtgagtcccaaccgaacccccaatgccaatctatccaaaaaactaacaccaaacagcaacatcaccttccacgccagcgccctgacccgcagcgagcgtaccgcgctgcgcaaccagcaaggtctcacaatctggttgaccggactctccgcctccggcaagtcaaccctggccgtcgagcttgagcaccagctcgttcgcgaccgcggcgtgcacgcctaccgcctcgacggcgacaacatccgcttcggactgaacaaggaccttggcttcagcgaggccgaccggaacgagaacatccggcgcattgccgaggtggccaagctgttcgccgactccaactccatcgccattacgtcgttcatctcaccctaccggaaggatcgtgacactgcccgccagctgcatgaggtcgccacgcccggcgaggagaccggcctgccgttcgtcgaggtctacgttgatgtccccgttgaggtcgctgagcagcgtgaccccaagggtctgtacaagaaggctcgcgagggtctcattaaggagttcacgggtatctcggctccttacgaggcgccggtcaaccccgaggttcatgtgaagaactatgagcttcccgttcaggatgctgtgaagcagattattgattaccttgactccaagggttacttgccttccaagaaggagtaaagtgcatttctttgggtgcttttctttgggattgggatatgcttgagattttatggatgtatctatggtcggctttacataaaagagtcctgtacagcggattagatacggtttttttttgtgcttgattcccctcccacttgctgtacatactgcgtggacaatatagatcgcttttgcacttgcattttatgggctggggcgagaatggacaatgggactcgatccccttttgctattcgcttgaatgtgtggtcattgttgaaacgaagaaactaaaaatatccaatgctagtttgtgctagatgtaccaaagtggtatatgtacgcaacgtcttctcgcagctttctatctcctatgatgcctcaaattggccttagttgaactcgaattcataaaacacatacggtgtgtagtctgcgctgccctcgccaccggggtgcatctcgccaggatcatcccgctgcatacggcccttcttgtctcgcccgaaggcattgcctgccaggtacgagtatttgttctcgaggttttgctttgcgcgatctgcttgcttggcagtttgtgtctgtagaaagtaaagaacgtcagtcgttgccacggtgaaacggaaaacagagcagaagagaacatacccggaccaaagcgcagacgaaatccagcggcaatccataccgcagcaccgtctcgacgaacactctcagaaccaaaatgtgaatccagaccataacagcctcactccaagccgtgcgaccgagtcgcagcgtctcaccccataccttacgctcatcaccaccaacgcgctcgacttccttgcgctcctcctcctttccaccctcgacatacttaaagtcgcggggaatccatttctgttcacggcacttatgcaggaactcggcgttgtgtttcttgaacgctgtcacggcgtacagcgtgaactcgctgtcggaggcgactagctgcgcggaccgcgggaccaccattggcgcaacggtctcgtaggtcttgaggaagtcttttactagctgggcgggcacggcgacgaggtgggtctcgatgtattcggagccctggatgatggttttcgggtcgaccactgaggcgagggacttggttgagagattgcctctgtatagagcgggttagtcatggttatgtatgctataagcacacgttgcagtgccatcatagtcaacatacgtttgtttccgctgcagtgtagacagcgtgttcttgacctggttgtattgggagtacttgaaacggatgtcgttgtcgatgctggccgcttcctatagtagacaaaagcgcattagcatataactccaagccagatatattcctcgtttccatgcgcggtgcaacaaaccttctgcaagagatcaatcagctccgccaagggcttatcggccctgtacttgactttgttccattggaaagtacgtaggtactgatcgaccggctctgtaggcagtcagaaccagaatccagacatcctcgcagactgtgttttcccctccacagccagatcaataccaagctggagacatactatcgttgacgaccttcatctgctcaatctgcgcctcgtcctcaaggatgttcttcaacgcatcgctgaccttggcaacgacactctgacacgaggcctcgagcttggccagctcgtccgcctgctggacaagggcatctagcgtgccgatcttgaactccgggattgggaaggagttggtggagccattgtccgaggagacggtggtcgagactgcttcgagggcgtcgtcgcggtggtgcgaggggacgatggaggtagggagagaaaggaggatgtatttgcttggtttggacatgattgattatgtattcgcgggattcaagggccttcgacgaggcttgggtgcgttttcggggttgaggggggctcgggtggcctcgatgtcgtaggcggtgggggcttgtaccactatgtccactctgccatttacaggaactcacttatacctccattattattgacatgagacttgggtaatgatcgcattggccggaaattagataaaagatattatattatcgatacagcgatcagaattcacgaagaatccctacgaaaagctctccatgtgtgtgagtatgaactaagagaacgttcaatatgaaaggaaagatgcatgaaatcatgatctcatactaaagcctgaataaacgtacatgaacgactttgcagctgcgtgaactgctgaatggaggtgcataacataacgctagaacacgattcaatgctcgctcagagtcaaaaaacaaacaaacagtaaaatgcctcaatggacaggaagtaaaccacacacgaggaatgttggttaccaaaacagccagtgaggctagattgaaccatagcgttagctgggagaacaggttagacatgaagaaagagaaggcaagacagggtatctttatcgagcgtacagcgctcgtaaaccaagtagagaagtagagcagaggtgagaggaactagcctgtacaaaagaatagggggagaaaaaaaaggttaaagcgcacgtgggattagtcaaagaaaaattgatgattagttagagattgtacccaagaactgggaaagccgaggcacctaggcatgatggtaggattatgaaagattggagtggaagtgagtacttgggaagagaagtatgtacttcagccgatcctagccctgctgcataccctggccctgctgcgtaccctggcccttctgcataccctggaaaactttctggcagttctccaccaggaacttgagaacgtcattcttcttctggacgtcagtcatctcacgagcgagactttcaggtcgcatgattgtcggcgcaaagaccactgcaacattctgactggtcatcagattctcttcgtggcgatcgacaacgcgtttgagatggaagatgaggaactccaggacgtcgcggtgcacgcgaggcagctcgaggagactcttctgcatgagttcaattcgcgcggacacagggttaacctcggcggaatcgatcacaagttcataaacttcgtaagtgatcaaggggttaggaagctttcggaaatactgtttcaaagtggatgtaacagcatggatatcgaggtcgggatccgagatatcgtaatcaaatggagagcgttcaaagccttcgcggatggtttggatgacggaagcggcaccggacttgcgataaattccttccatgtccatgcctgattgtatatgttagtataacgaccaaccggataccgacccacaaaacatacctcgcagttcaacctcctggatacaccgcgtgacgatggctggaatcatgcctttttcgtattcctggcgagcctcgagttcggtaccgaaaagagctgcgagagtcattagcttatactgatataatcctgaactgtagtatcgggcacataccatcgggggcagcttcaatcaacacaggcacgctgtcagcttgcgacatctttcctccctgcttgcctctttggtttccaaagaacccaaagccttggcgactcgggtcctgagtttgggaacgcggtataccaccgccactctcttgtccctgtcctccttcgctggacatgaaggctcccttaagacccttgacacctttggcaacgttctgtccgccctttttccagttgaatttgcgaggctggcccttgcgaatgctgacaacctgggggcctggcacgacagtggctgtagcagactcggactcttccgaaatgtgagtagatccgtgatagtcgttgaagggaggtttcatgacctcaatggaggttgtggatctctgcttgttgtgcgatatgccgaggccgttgggtcgcggttgaccgtccgtggctttgtagagttcttgaatctggtgaaccaactgattgttcaactcagctagctgtgcattcttcgaagacaattgctcgaattcctggaagctcttctcccgtcgaatgttcatggcttccacttcctccgacaggtcattgcgcttctgcatgaggtcttcaatttgtggggcaaacgagtctttcagcttttgaatggactcagccagctcgcgcagcacatggttggagagtttgccgaggtccaatggcccactggggccaccacgtttctcagcctccatatgatcagtgaggactgtgagctcacgtagaacaatctcgcgctgagcgtcaaggacaaccatggtagatcgcttttcagaaagctcggtgttaacctgcttgacatctgcggcggtacgagcggctgactcgagttctgcaactcgcagacgttctttgcgcagttcgttgcgaagccaagagatctcttcactctgtgatccagtgatggggctgccaacatctgttccggcgatgcttcgagtggtaggtgatcgagggttcttgagatctttgctgatccgcacactcttctcactgtagcttcgaccatggcggacagagtttgagacgcgccgcagaaacgactcgttgttttgcccaacggtgtcatcgccaccgatgatgcgcgataatccctcgtccataggcaagtcagctccataccgtagcacgggcgatgtgccggcgccatcgtaatggtgcgattcatgcggtgaggtgttcaaggcagtatgctgaatgggctgttcgaaagtatcgctacggagcataggcaagtccccgtactgcgaggatgcaggtgacgatccgacctcttttctcggaatttggtgaagcttgctttcgagtgaatcgccgcgctttggcagatatggcaagccggagggttgagagcgcggcaagtccattgaaccgtggtcgtgacgatgaagctcattcgaggaacgagctccagccgaagtgaagtcatccattggaatgtgtcgctttgtgtcaccggagaattcttttgatctggtgctgtcggggctagtaggcccaggaaggttgctagtctctctgaagctgattggtatgtcggatgagctacgagtgtggcgaccctttgcaggcttggatgaatcggaacttgataatggtgctttatcgggtgaagttgagttgttttcttcccaacctttctcctgataggcaatatggggagaatgattatcggaagatgttcgagaaggaggttcttgtcgatattcacggccgtcgtgggacgcttgattaaagtagtcgcccggaggctcctgccgtgtctgtgagtgaccacgggaggaattaccctcagctgaaggatcaaaggcaagaggaattaacagttcaccgccatctgcatctgcatcggtgttgtgtgaaattgattgacggttgctgcggtatgtgctggagggaagaagaatattatctgtgtgaatggtaagtaagagctcgtgaccgggcgacaagacaccgcgcgagaagggttccagccctgaacgcgcgaggttatattcttatagatcaataatgacaataagtatatgcggtggcaacgatggtgcataaaaggatacaaagcgctgcaaagaccacacacaatgtgaccacatgtgcacgatatgacaataaggtgacaaaggctgcgatgattatacatctagactgcaacaagggtttcttacctgaatcagcctgctgatttgaaattgagcttccgggtccttcatcatttagatcgggcgtttccgccattttactagggtcaggcgtgcctgtatattcgctgttctcctcatcgtttatttgcgattcttcaaggaggtggggaggcaacgagggcaaggatttgtccagcttcacattaggtgctgctggttttttcccactactgccgccggctttccgttttctcctccgtgccattagcgattcgtgacattccatgcagaaaataccctgcgaagtacgcgcatagcgcaagttctcaatttttcgcttgcaatttcggcatcggaagcattgagcacagaaagcctggtctcctgttaagatggccaaatcctcaatcttgttgttgcaggagctacaactgtatgtgcagttactgcatataagtgatccgtcgcccaaaaggaggaggtgcgcatccgaatccagtagagtgttgcatgtactgcatcggaaacagtcgatgtgccatcgatttccagctgccagaggttagcgacatgaagaaaatggacaaaaagaattcccccgcaatatcccacataccaagctcaaatgcttttccttcttcaagggtctgccaggacggttagtcaagctcctgtccgctcactccacccacagtgtgcctacctctccacagcccttgcatgggtaggactcgtcctgctccatagactccggataagcgccctggttctccatcttgagatccaccgtctaccgcgcaaaatgtaaggtcgactatggccgtagatcgatccgaatataagtctggcgggggcgcagacttagtccaacaattatgtgtatccgggcgattcgtgatcgctacagaagatctcactcgcagtcacatgcgccgttggtgctgctggcttgaagatgcttcttgggcgtaacggcgggacgccgatattagggagatagggacgtcggtgcgggtttggagggggagatgcaacaagtgctggaaggacgaatggtggctgaatctgcagactaccgaggagttaaaaacgtgatccaacactaggtttaagcgtaagacaccagtccgcccaatctgtcctgaactaagacaagcaggtcggactaggatgataacggcaatcatttgcctatgaaccaaggatcatgaatatcaatctctcgacataccaggcactgctagccgtgctacagaagtgtttcagataaatgatcgcggatgttgtgatcattaagcgcaacaggcgaagcgaaacggaaattgcccctcgcgggcgttgaattggtttggagattggacagacagaagccccgaggcaaaaggaaatgagatccgggagttaagactataatggaaaagaaaaagaaaagaaaaagcaatgaaacatgagactgggattagggggttggagggatgagaaaggagagactagaaggtgaacttttggctttctgccacagaaaggtccttttccccacgtaacttacaatatcatcatattaagtactctatcctctagcaatctttttcctttcacgcggtatagatctaatattattgtgctctgtaactgcccgacctatccttgtctaaattgtaccttaacccctagtatgtacgctggtacggagtactttgactgaggacgcgcagcccagaacgtgcggagtttcatttccccaatgcaacgaccaatgggcttcttgatacccctgaattttgtatctgatttaatctccgctaaagtgataatgaagagggtactccgtacggtactattgtattctcccaacaatatcaacccaattaaaaagccaccgtctgtgaaagaggcccaagtcagcttctcctgggcagcttcggatctggagcatttcacctctgaggatcgctccatagccccagtgttttgaccacggtacgagtattttgtctcaaacacttctcacacgctatctccggccttcggtccttcattttcagtctctacaccgtagtttcccaaagactccggagcctccatggagagtttaatgatattcccgagaagctcaattacaacctgaagacatccagccttaagggcagtgcctacattacccctgatcctttatattgaagcccaggcctcccgtgctgtttggaggatgtgaaacacttgccgtgtcacgtgagagtcaatgtatatgtacggagcctctattaatagcccggctcatcttttcaaacactttaacatacggagtaaagttgaacgaaattaagtgtcgagaactcccagtatatgtatcaggattgtctcagggtgtgtcaggtctaccgaatgttttgggttgcggtactgtatcatgttctggacccctaaaacaacgcctcgcaaatgaaatacatcataggcaccattattgtaaatattcggtgtgtattccatactccacggtggccaatgatatactgggtccacttgcaattacatatcaatttatcttgtaccccgtgcatacaacatagatctgggaaatgggtatctctacttcgtgcattgaggcataatgaccacccacaaagacagtttacattcctagcatataaagtgtaatactatccaacatgtgttcgtaaaatgaagaataattcccatattaatacacagtaccgtttatcaagtacaatatgtagttgggcacgtaccactggcggatcggcaggagtggagtttatacgcagccatgacatcttctcttcttattttgtacgcttcttcgaccgtacaaatccagatgttaattcacatgcctgactggcaaaaacaagatcaacgtattcaaacgtgcaagtatgggctcttaaaagtcccagccaccgatgatccacaaccatttaatgatgggtctgcaatgaaatccgttattgaaagggtgacagggctctccaagtggcactggtaggatatagtatgatatgcgcagctgcccgataagaggacccgtgcctggcgtaaggctgagaatccacattcagacgatcagactacaatgtctgggcataaacaataaaggcccacacccccgttctgtaaattttataattcgtctcttgtcgatcaaagtcgggttcatttcaattggatcaaacgctgacacttggattacgttggtatattctaggtcagttggtgcattagacgtgcgaagatcctgcagtccttcatgcggcaattgcaatgagtgcgcgtcatcaacttgaagaggttcaaacggaataaatcgagaatcgagaaagtatgcttccaaggcgataatgcccatgaaaagagtcttaacggtaaatctttggaacaggatacatttttttgacatgtaaggaaccacttagggaaatgctaccagatgcgatacagaaaggatcgcatgttttcgtatgagtagggaatcatacactcgaggattccaaccactcggagacgtagatcatgtgaccacaatgaggcttgaaggacccccactttagaaaattacgaatcagcgttgcccctcgaacctcacttcttctttcatctctgactttttatcgtctcaccttaatacgaacgaatttaaaatgggtgtcgagagaaagattattactcgtggcaacggcactgactcgcctgcttcgggtgacaaggtcgctatccactactcgggatggctctacgacgctaagaagtccaacaagggcttccagggcaagcagtaagctgactgccatacctagagtcatttaggttatgaattgagtattttgtatactaattattcatcccaatagattcgatagctccagaacccccggccgtggccctttgactgttcagattggtgttggacaggtcatcaagggtatcatatcctcttttttctctctctcaatagaatcattcagactttcaattatttaacttcttcacattccaaattggatgctaacactacctctctgtctgattaggttgggatgagggtgttttgcagatgaccctaggagagaaggcaaccctgatcatttccccgtgagtaaattccacatcgaacaagagaatatcggactaccactaacatatttctcagggactatggctacggtgacaagtatgtgaacacactcgacatactgacatccgttagctgaaaatgttaacatttcgtttctacacagggcagctggcaagattcccgcaggctcgactcttatcttgtaagttcgtgcaagtggataatgctatcgggaaactaactatgttacagcgaggttgagctccttaagatcaacaacaagagcgcctaaataagcaattgaattgagcagacaagcatggcattgtcagctattcactgcgatactgctcacatcatacagtacaagttaatcctcatctgggttgcgtttcattgtacagagtagagtgttggtaggtaaagcacactggttaggtaatagagctcgatgaagcctggaaagcgccctctctgtccatcgagtacaggtatgtggaacaataaagatcattaaaagtcgctaaaagatgtatgtacatatgccatatatacagaacgaaaaagcagagtgaaggccgacctagagacggtgttgaacaagtgactgaggcgccggagttgggaccgagtttttctcagcaggctcttcccagcgcaagatacgagctattttgttatatgagtcgataccgcggcgagcgtggtcggcaggaacaaatggatcggtctctccgagagttcggctaaagagttcaagagaaacccagccgcggaagccgagatcttcgaagaagacacgagcgatatccacaatgggcagataaccaccacgcgattcctcaaggggaaatagacgagcgttacgggaccaattcatgcgggcaggctgtccagcgacatagaaaggatgcttctcatccaacggggcggaaagacgctcaccgtcaacaagctggacatagaagatcttggccgggtcaatattggcaatgcgcaggcgctgcaatgaggcagccaagtccgcagccgcattgggggtgcgacccgaaggactagcagggtctgcatatacacgaccggcgatattgaaggagtcaagacagagaccaaagttgcgacgattgacatcacggaccacctcccacgaggcctcccaggtatcaatgtgatccccccaacagagagcctcgtagacaaagcggaaaccagccccggcgcccaaatctgctaagcgctggagatcacgaacaatgactgtgcggtcgccagtggtgcgggcagcaccggtcttcgggtctggacctaggaagtttgacggaatctggatcatgtctgtgcctagcgcccgcgccagtgtgaaccatttgggaagtttctcattgataagccgatctgactccgcgcggtcgatgaggccctcgtacatggaaaatggctgcaggcagataatggtcagccctaggcgcttacacatcaaccgtgttgaccgcgcggcttcgtggtgatcaccgctaaatacccgctgcgcgtagcagtctagatcgtcgaagaagagttcaatgccctcgaagccgtgggctgcggcttgcatcagcttgccgggtaggtcgtgtacccagggccgacctaaggacattgaggcgatagcgggacgattgaaagccatttggaagttatgaatgggtacttcttttctatgtcgatattataaattcaaaaggtgggttcgtgtcagtctttcttctctttttaggaaagtttgcaagcggagatattaagggagcgaggatttctcaacaatattaggtgttttctaggtatcaaaagggaagatactaaaatgattgcgacaaaacgttatcccctacggtgctttctatgattgaacgtttttcctggtctgctgtgattcgtgtcttgatgacgaggccgaacctgatagagggtcatatgtctgggtaaacgctgacccgctttcgttttcccaccaattccaccacgcctggagtgcactgttccacccaccacgcggaattttgcttccccattaaacatgcttcctgcccacctgtccttagaaggaaaatacccgtagatacccggcaaggtttttaccgtgctggtcggaatgtaaccggagaaccggtgccgaatggtcatgctactcggagtccggcgcaataataatacactttctgcttcagctctacgggttacaacgggtttgaatttgttcaattctttcagaaccgaaatctgcttttcatcccaatcatcgccatgtccgtcaaggttgccattatcggcgcaggccttattggccctcgtcatgcgcaatccgtaatctcaaacccctcaacagagctaattgcgctcgttgacccaatgccggctggcgaagcaaccgcatccagtcttaaaaccaactactacccttctgtggcctcactacttgcatccccccaccgtcccgacgcagcaatcgtctgcacaccaaaccacacccacgtccccgtcgcaaaggagctccttgcaggtggtatccacgttctccttgaaaagcccgtaagcgatacgctggaaactggccgctccctactagagttcgcccaagccccagagcgcgcccacctcaagctcctagtcggccaccaccgccgcttcaatccttacgtgcgagctacgaaggccgccctagatgctggatctctcggccgccccattgctatcaacggtctgtggaccttgttcaagccagatccatatttcgccccgccaacagactggcgtgcatcgaatgagcgcggaggtggtgtcatccccatcaaccttgtccacgacatcgacctcatgcaccactttttcgggcctatcgtgcgcgtgacagcagagcgcacgctgccacagcgcccaagcccaccacacaatgctgatgaaggtgctgccctgacgctgcgcttcgcatcgggtgttgtcggcacgtttctggtctgcgatgcgacgccgtcgccgcataatttcgagactggtacgggcgagaacccgctcatcccacggacgacgactggcggtgactctgatttttatcgaatctttggctcggatgcttcgctcagtgtgcccgacctgacccgctggagttatgatgctagccctgagaagagctggaattcaccattgactgttgagcggattccgcttccagatgataaggcgccttttgacctgcagcttgcgcattttgtcgatgtcatcaatggagatgcggcgcctagctgtactggtgaggaaggtttgcgtgcgttgattgtttgtgaggctgttcagaaggctatgtggtcgggtcagcctgtggatattgatgttaacttgttggcaaaatcggatgactagttagctacagactgatgtgagtgtgagtttactgatctgtgaggtgcgtgtgtctgtttgatcttcttacaatatgtccaaaagggggatgacaagacactaaggggtatattcattaggtcatttgcttcttttaaaccagcacatcctattacacgcagaccacatgatgtgcaatcctaaataattgcgagcgcggtttggcacctcgtccgacaacaaaatcacaacgcggcaaaagacaccaacacggaaatgattcaccaccgcatcgttcaagcgtactttggctgagccgaagtatcctcgacttgctcagtgcgcatctttccagtatcaatgccagcagcctcgacatcgtttcggaaaagctcttcattctcacgcagctgggcgaccatcttcccatgggcatgccgcacgggcttgatgtcgaacagctgttccatgctctcaagaggaatacccttggtttcagggacgaggaaatacacgaagacaatggagagcatcattaatgatgcgaagaagaagtatacgccgtatcccatggctgtgaacatctgcggagtgaatcgcgagacgaggaagttccagagccagttggaggcggcggcgcaggcctgtgccatggaacgcatgttaggatcgaacatttcctgcagatgctgttagcaatatgtcttaacgcttgtggattgattaagtactggaacaatgttcaaatactaatgtgcggatgcttaccgagttgaggacccacggggtaccgttccaggttggggtatagaagaccgtccacaggtagaagaaaaacatggctgcgataccaccgctgctcaaggactcgcttggattattttggggttgggcaaccttgatgtacgcgccgacaatccacaaacatacggaaccacctgctgcgccaaccaacagcaggttacggcgaccgacgtgatcaatcaaccaaagcagccaaatgaaagtcactatggtcttgactacaccgaaaattccagtggtgaacagactggtgttggtacccctgacaccaatctaaaagcattattagcgtcagtcatgaatgctcacatggatcgcaacaagattgcgacttaccgatttgaagacagtcggactgtaataattgatggcattgataccagatccattctgccagaagaacagcgcgcttccgaggaatagacgccacatgactttcttgttggtcccagccgccttgaaaggtttccagaaaccaatgccaatattacggcgctgctcatccagggcttggtcaatagcaccgatctcctcaatcatatagatatcgtgctcgggcaattggcgtatccagcaaagatttttgatagcctgctcgcggcgaccgcgtccgaagagccaacgaggcgattcccggatgaagtaggcaccgatgatcaagagaccagaaggaatcaactgaatagcaaaaggaatgatccattgcttgtggctaggtgccatggtctcgtcaataccgaactattgatattgtcttagtatccacaaaacaacccggacacaaacgaaaaggaaaactcacattgatccagaatcctacaagaccgccgatctgccagccaagctcatacacaccaaccaacctaccacgaatagccggaggagccaattcggagatgtagattggggtgatgttagatcccgctccgacaccaataccagcgagaactcggccaccgtaaaggagaccaagtcctcgttgaccattagcaccaagcatgataccagcaccgagagtgaaaaccaagccagaggccaacaggccaaccctacgaccccagaagtgaccaatgggatacacgaacaaagcaccgaagaaggcaccagcctggtagcaggaaacgatgttggcgctgatcaggttcttggtagtagtagacatgtcgtcgaagtggaactcactcttgaaggagtcaagagagagcgtagtgccgatgaaagcactgtcgtagccaatcatacaggatgtgcatgatgccactgctgccagaagatagattctccagttataaaccacgctaggcgtcggccggtcctcgaccagcttcaggatagacatggcagcgattcaatatagaagaattgaagaggaaatgcaagagcctctgtgaccagacgacctcgatccccaatgctagatgcagagaggcagtaggatgtatcaagagatgtatgagatgcaggtgcaagcgcaaggggagagaagaggaaaccaaaaagaaagcctacaccacgttttctcgcgagggtgggcaagatataaataggaattgccccggactgtcgattcgcccttggaaaaagagaggacagaatctggggtttggaaagggggagaaatcgtggggatgcggagtcggagaaaggtataggacaggttctcgaaatccgaaaaatgaagaaaaccaaggcgcggcaaaacgaatactctaagttcttctgtgcgtgaggacagttgcctttgttgcctcttggcacctacaatgtggcttgctaccaagaagaaattgactcagagggacatgcaaactctgccgggctgccacgaagtctacaaaccgagatcattcgcttaagacgttggattgtggagatccgatgccgctgggagaagtggggacttccccggcgggtttccagtaacccgcgacagcgtgcatggtcagctcgatctttctggggtaccccggaggcaatgcagtggacgatctagccctggtgtgaaatagcgaatggttattggtctgataagatgaacggaaatggacccatgactaggggagggagaaaacggccaatgaccgattgctagacatgggtggcggggaaaagcctttccccggaagcttaaggcgaggcgcggccactgtgaagtaatccattggcgactgtctgccggagcaattatcagttttcaagtcatcactcgtattacccgcgttattttcattggctcctgtaaagttccctttatcgtggggtagaggtggttgttggtggctgtagtagtgggaaatcattcagcccggcagatgttctgtcaacaatgaagcatcgacttttcatctcatgaaagaggttatatagaccaacaagcaatcatttctcctcatatgtagaatatgataaaatgatatttctcgagggaagtgggataggtgaaagagtagaatatttcgttgtttctccgacggcttatcgctttctcgcagattccacgacgcctatttgataggtcatgtgatagttgtatcaatgtgatcgtacgtaccagagtagctattgaagagggtatacgatgggcagtctggcctagcagataagacaagggcgacgcaacaacactaaccatccaaggaggtcagctagcaagcatagggaccatacagaccacagtaattccctctatcttagtggagcaacatcatataaaacccttttcattctatgggatcctatacgctaagttctatctgacaccctgtctgaaaatatagcaactatctggggtttccccactgtacgggatcatcatgtatctgtcccatctttcaggcagaaagaagtcaatgccaaaagaccgggtcacgtgatacgcacgaggcttatgatttaattgcttcgcttcgctccgcaattagtacagatcaggtaataagtgatctctgaatacattcgttgtggcttcatagtgggaaatggctcggttcaatcttcccccgaactgaaatgtaggaaagccgccccacccggcagaggaaatatccatggtacgtatacggaacagtgactagtgaggctaaggattttccgtctgaatttcgaatttcgtcttataatattgtaggctcccttctgcatatctcagaaggtaaatatacacaatcatcatgtccgtcacagaaatcaaccaaacgcagctagaagagcccatcgccattccctctaaccgtgatggcgtcgcctacctgtacggtcaccctcttctgaactcgctctccccacctctccaccagacagtctacaatgcgctcggtctcaactggactcaaatccccttatctagtgtgtctggatcatcagagacataccctcccccatacacacggtcgccgccgattgagaaatatctggcatcgatcaagtcgaatccgaagtttgtcggttcgtccgtgacaatgcctcacaaggtcgcaatcatgccatatctcgacgacctcaccgaacacgcccgccaagctggcgcctgcaacaccatcttcctacgcgaggacccaacaactggtcagcgtcaatacgtcggcaccaacaccgactgcgacggcatccgggaggccctcacacagaatgcacctgacccaacacgcttccgcggccggcccgcgctcatcatcggcggcggcggcactgcccgcactgctatctacgttatgcgccgctggctcggctccagtcgtatctacatcgtcaaccgcgacgccgccgaggtcgccgccatcctcgaggaagaccgtcgccgcaaccctgaccccaatgctcaggctcctcttatccccgtcactgaccccgccgaggctgcccgcctggaatcccccgcggctatcgtatccggtatccctaactatcccccgaaatctcctgaggagctgcgttctcgcgctatcattcaggctttcttgggtactgctgcaggtgcggagaagcagcagggtgtcatcctggagatgtgctaccaccccacgccctggactgagatagctcacctggcttctgttggtgggtggaaggtcatcctaggctctgaggctttgatttggcagggtctcgagcaggcgcgtctttggactggaaaggatgtcatcgggacccctggcctcgtgcaggaggttaaggatcttgtttccaagaccattgcggaacgtggatctgcgaaatctaccctgtgatttcttttatacaatcacgtttcgtttttttttttttttttttttttttttttttttaaagccccaaaacccctggcctcgtgcaggaggttaaggatcttgtttccaagaccattgcggaacgtggatctgcgaaatctaccctgtgatttcttttatacaatcacgtttcgttttttttttttttttttgatcattgtatagagcccaaaatagctgctagttgcattgtgtatatataatagatggtgtcctcattttgtaatacatctcaatatgtatatctgtacgtctcatcagacctatacacaataaaacaagatcaaaaggctaagccattcaagctccgggtcgtgagtattccagattacggactcggcgccagacttcgcgtactgtccgctcctgtgtttcgcggcctgactcggttgcagatgggccagcgggtctgaaatgtcattagcaagatccaacactagaagggaaatcattcaaagacgcacctaattgctaaatacaacctgctgccaagtcggacatcttcgattggcgccgtatccacattctctgggggattagcagtagtcataagtccaccggcctccagaagaatagcagcaccagcagcgatatccctgtaatagtcagcctcagcatacctatcttcgactctccaagagatagaagtagaaaaagagaaaagaaaagcaaaactcaccactcccaacaacctccctcccaccaaatatcaaaagaacccattgcaacatacgcaagatcaagcgtcgcactgcccaaactgcgtacaccatgcaccataccacctctcccattccgactacccacctccgcagccatattaacaaaactctcaatcttgcgatgcatatttccatcaggaatatcgcggcggtctttaccccactcgcaagaaaagatacactgtgaaggcgcattggcaggcattggcggggtcgggttgtggatgagcggaagacggcgagtctcgtttagccaggctccgcgcccgctgcaggaggaccagagctggtctgtgaatggggcatatattacaccaattactggcttgtgttgcacgatgaagccgatcgagacacaaaacatggggaaaatatgtgtgtagtttacggttcctataaggtgggttcattagttaagtgtcggtttagaacaatgagcagtcggtcatggcttcagggtcctgatttttaccatctaatgggtcgatgcaccatgttggttgctcgtcaatgaggtagtcgcgcgactggcctttggcataggcctcctcgccgaggaatctaggggtctgttagtcttgttgccagcagattttggtaatgatactaacttgtgagaggggtatcttgcctcgagggtgcttcggatgaatacttcgacgtctgccaggtaacactgtgagcgagtctgatatgccttatcggctatgccgccttaccttcgtcggtttgtgtcacaatatctactgcgttttccttttcctcaaaggcgtaagaggagccatttgcgcctgaaatacgctggtcaacacgctccatgagcatcttgcctgccttgcggcccaggtctactgcgaaagcgtatatctcatccagctcatctcgggaaaagggtccgacggccatggtgaaacagattaatggggatgtgtggaagcaacgtctcaaaatatgttcagaagcaaggtcgaagggaaaagcctagcttcttgagtcatccggtgaaaattggtgtgtccaaaacaaccgtcactaaccgacgtcgggaattgcttatcgagacgtttccccactttatggggaaatttatagcttcccttggcgatattactaaaactcgtagttctatgcattgctgcttcacttgactcgctactaattttctctcttctaagaatggtatgaaaacaacggattttgcctccccagtcaagcggaagtcatcattttccatgatgttatatgcatgcaagtccctgtatactgatcaaaccgaacagcataccctggaatcatagaccgcatgatgagatagtcgatagcattaccccatttagcggttccattcaaggttcgccggatacctcgatctaggctttctgtgagccagtccgagtataggcatggttgcactatagtaaggtcaggaggagcccgtgcagtccacatttggagcagaaaatcagtcatgtcatttagaaatgcttcgcgttggatctgaggaatatggagatttcagatagtcagtggcgtaccattgaccctttccgaatatatgaccgggtgttttgggctgagaaaaaggcttggtgctttgattgatgtacattgttctttcaaacatcagaaagttttcactgcacgtagttcgtttttccaattattggaatcgtgaccgactcgagcagccctctctacagtatcctcaaaggcaattttgaatggtctgtaggagccgccatggcggggtgttttatcgccaaaggaggagggaacccctaggcggagttggctggcctccgagagaagatctggcaagttcaccatgctgaggcttttaagtggtctggagctgatgtgaagcggggggtacgggggataaatggagagagaaccggtgagtgtcacagcgccaaggctgtttgcttgtgacgcaacggccaatagatcaggacattgatccccttactgtgtagcaacgtgcgtgggctgatcctagtttttgtattttatattatatttgcgttgaaggatgtgtttccagttgacaaatataatgggtataatatatttcgtgtggcttgtcgtcttaaaaacaacggcatctgcggcatacagttgggaattccactgatttgatacatgaaaagaatgtgaatacgcatatcttctggcgtgggtgtgccgccgactttcctttgactcattattatgctgagtctgaagatttaagaatactcttgcatctaacattgattggatcagaagcaagccaacgaagtttgtattgtctgcggcaatgtgtcatcagatacagacggggaaggaatatcccaagtttccttgtatctgaattcgtcatggcacagattgggcagttcaccactagctgcggttgatcatcattcatagaaatagctggccatattcaagtcggctgtccatccatttgctgtaacctgtctcgtatcgcttcatgatcattattcccttcatcgtctttgtactcttgaagcacaatgctccgcataacgcgcctaggagcgcggcggccagtgaacagttcaaactgagcgaagccttgttctggcagaacatcaaggccatccagggctacccaaccgcgatgggatagggctcgtgtttgtttcatgagaggggtattgaggggcttgtatgcgagctaaaatcattggttaggaataaaacaccattattttgggttggtacaagagtaaaaaggaaacttacgtcaacaacaacgccacctgtcgggctctctagccattgtgctggcatatggaaattaggtgctagctcgccgccaatgctatgagccggaattcctgagacaacgatcgtcggctgtttgaaatcggcaggccaggggtcggataatgaagcaataatgcgaactgtgggacggccagacccgctggcttcttttgagtgtagatcttgccggttgtagtggtgggccagtctttccgcattggcgatcgtacggttgtagacaaagatattttgcacaccaagatggatcatggagtaaattgcagcacgggccattccaccagatccgatgacaagacctgtcgatgatgagcgtatcgcatttgccggagacagaccgcggcgaatgcaattgcagataccaatccaatcggtgttatcaccgtgaagtcccttgatagggccggcacggctcttttggagaaagactgaagattcttgaagacggttgtcgtccaggtcatcaaggttgcggatggggatgagggtattgacggcaccgatagctcgtgcatgcgcagacattgagtggaggagagggatacactctgttttgtatggaagactgacactcgatcctccgaagtattgattttccacaagttcatttaatccccgtagagtaggtgattggtgaatggagtaattgtgcggcaaaccgcagattttgaaagccgtgttgtgcatcgcgggcgacatactgtatgtggtgttggcgccaaagacgaagaattgcatcgggtccaaggcaaatgagctatagagcgccttctgcacttcgcgggctgtgatatacgatcgtaggtgagttggaagttccgttaccaaggacggatgtgtgactggggagagaataggattgaagcaacgagacatgcggccaagaggaccggtgttataggcgatcagcgaaatgccagcaactggcaggctttggatgcgatggcgaaatctttgcaccgcgaggttgtcttcgggtgtctcagccggttggcatagtcggactatgtcgcatcctaggcttttagcccgctcataaacttccatatactcatcgccatcccaacccccgggcagaggatggaaggcttcgaagtggccaatgatcctggttcgtccacttgaggagatgatctgggaaatgatattgtcatcccgggtgaggtcaactgtgaggaaaccggtggagagtcgcaagccatggcggacgaggtttaggtacgtttcatcggtacatctcaagggaacttgattgggagacagagatcctgtaggggtggtatagctttccacatgatatatcaacggcacaatgatgttgcgacggattgttgctaccgcctgactaatactgtccgcaagacttgagctgaggcctggctgaccagaagagtctgttacatcgactgccagttcgaaggcatcggcggtgaattccagctgctcaatatccatgcccttctcacaaatcttagaaaatggcactgacactgcagatgtgtacatacgagattccacaggcaacagcgacagcgggaaagatgcatgctggctgttaagttctgcaatgtccccggttatgaaggcgatgaaccggagaaagtcccgctgaactcgtttcaatgttaaaaacggaatgggagtatgtgacctaggttctgttcgatacgtcggtgatgcaacatcgctatcacttctggcctctgacagattgaaaaattcgagattcgagcaccctcggtatatcggtccggacaattctaggaaatgtcgcaccttttgcgtatcccacgctttgagatatgactggatgctctctgcatctctaacaacgtggataacaggatgcgtctgcgcatattccctaagaagtcgttggccattgcgttccatcgacccggccccgcacgcaatcacacacccatcctggttgtctgctagcatcgactcaaagacccgggcctcttgtagtcggtaaacagatccatcattttccttcttaaactcagcacgggaacatcccacagtctgatgaaaatagcggtctgcatcaatcaatcgtcgaccggatgtcgccgcgagaatgaccgccagacttgactttcccgtgccacggattccgatcaacacgacagatgccttcggactgaaggtccgtggggtctgaagatggccctgttcaaacagtattggagatccgcggttggagttcaattctttgagcgacggtggatgcgaatatccggatgcttgtgtgcgttcactcgatggacgtgaaggtggttgagatgaggggagaatagtgtgagggggcacgacgcctgggctatactttcgaggcccatcatctaaagtctcgacttcgtggagctttcgtttcggtgggcgtaccaacatggacatggcgcatagagtgttccacgtgcggcaatgaaatcaggagcaggctagttgaggacccattaccacagagggaaaggtgggggccacggtagggtattgagatatgtgtatagaggatccggagatgtggagggaacgaaccaatatggtaagcgggattttccaaggtttgcgggggaaaaggatattcgtgaaaaaggcgtgggtctgggtgcccccgggccatacgctaccgttacataaggcggacgagcactcacccggccatcccatatcagattttgcctgcagtatgattcgtaatataggtattttatacatttgaatacatagagttatacatcgaaaagtccttcatgtctgaattctctactccgtacattgattctcaatgaatataactctttctccatctagctattcactagataagtttccggtttataatgaaaatatagagtactaattgtctaggtaatttgacggtaatgaggcagtaatgaaaagctggcggtgagtcaggcggtcaatatctactagtataggaaaatctgatatggcggttaaagattgccgtaacccggggactttcgattttcctcttccccgcgggggacttgcgctcagatacgaacatgcgaaacaactggggaaatcatcgaaatttctgaagtttggtctgaattgcgcccctagcttacccaaaaaatcagcttcaaattcatagcttaaagctcagtctgcacgcgattaccttttgcgagacagtgactggctcaccggtagccgggtatcgacccttccccggaagaaccttgttagcaagcgtcttgttttgtgctgcacctaacctcaacatcgcgcttcccccaacagccctgatatatttccagtgcagctcattttcatggcgtaatcgcctgatcgtccgtgcaggcgcctgtcggcaaaggattcgtcacatatcacttggggggaacatgcacccgaatcctccaagtggatcgcaaaatcaactaccatgagcgccgaacagcggcaagctaccggctctagcagcaagtccaaacgacgatggcccgagccagaagatgacgggaaggcgacaggggaaccgaaacgtcagcgtgtttcacgggcttgcgatagctgccggtcgaaaaaggacaaatgcgacggaaaacagccagtttgctcgacttgcgcatcgctctgccgaccgtgtacttataaagccaacccaaagaagcgaggcctgcccactggctacattcgctcgctggagttactttgggggctggtattccaaaggatccaaggcagtgaagatgtcatgcgagctttgatgcgatcaatcaatcttccaagtcacttggccacgatgggcaaggaaacggaggggtccgatgcattgctagcttccttcaaaaacagcacagtactcagagatattgagcgcattcttatagcactagaacagccggaggaggaaagagagcgaaatatccagggatgtggcgatggagagacacctctcgatgtcgacggaattctttcgtccgccgaagcacaggaatggcagatcccagaaggcatggaagctcgcgagacgccattaccagggatatcgccgactcgaaccgcaggaggcatcgctcctacgaaagtcaccggaccacgcccgactacagactgtggtattcagacaagtgcaccagattaccgaccctcgtcctctttcatctcctcgccgaatcctcattaccctcgatcgctctccatgaaaacccctcttcaactcccctataacgcatggccactttttgatgtatatttctcctacacgcagtgttggttccccatactcgaaaagcatgacatacttcgtaccgcttttcaatataccgaaggcgatgtatacgcatcgtgtttaacccccgggtctggggaacacgcggccttatgggctgttctcgctctcgcctcgctccaggatgcttctatctcagcttccggtgaagctgaagagcaccctactgatcatatgactccatcacgaatgtataagactgcccggcaattgattccgcctgaaagtggccctcacgaaatcggacatgtgcaagcactgttgatcctgggtctggtcaagtttggacagcaagaatggactgggtcatggatgcttgtcggtcaggctgttcggattgcgcatatactaggtcttgatcaaccttcgttttctccatcatcgaggactccggatcaagaaaaacagcttggtcgagcaaaacatgtgtttttgggttgctttgttctcgagactctcattgcggaatcaatttcacaaagcccatcgctgcgaaaggcagacctagccagggtaggcgctatcaatgaagatggtcttgaggaatggcatccttgggaggatcaaactgggttacggcccacccaatcatcacgggcatctatgcagcgtggtccccttcacgcgttgagtactttcaaccgcctcgtcggcctcgtatccattttgaatgatctatgctgttgcaagcacgacccaacgatatctcgatcacagctggagcaactggagttgcaattacagcgatgggtaacagaattaccaaagagttatcgtgtcgatctacaaagtcgccctgtgagactggcttctccacatatttttgggttagagatgacatatgaaagtgttgtcattgctctcagctctcaaattgccattcgtgaatatgatcagaacatacccgaaccccctcacaaaattcgtgctacggaaagctcgaaaaaacttttgcaattgcttcaggcatatgtggagacatatagcttttcagccacagcaccaacctttggtttgatgcttcgatttggccttccacggtccatctctagggatctcccatcagttcttgacatggggctacgaaccaacatatacaatctctcttcgcagctttctgtattgtggactatgccagaccagcaaaccgctagtcaaggtatatcacaaagatctcaacacctaggtacttctcctgcggtctcacagcatattggtgcctctaccggcggagatttagaaatcccgttatcgctctcagtggccacaccttcacatcatcttcgtgcaacacatgcgtctcaaaataatgctcatgccgcggctgcccctgagaacccattcctccccacgccttggctcagagccacacaacacatcgaagatgtatctctcctccgcacaccgtcctctctaacctccgtcgggggcgcctctgaacttcccccacaacagagccacttggatgattctcttaacattgggctttctcatcctacatcagcgcctagccaatcccacagtaccgggatgctcgccgagatttcgccatcgtatcaccagaccgcacactaccacccaacggcatatcacgactcatccgtcaatatgggcacatttgttgatatggatggctatgcgcgtccacggaggcagcggattgctcctgatctcgatgcattatttgacgagctggcgtcattagatggtgcagaaaagtatgcatttatcccctatttctttggcataatcactgactttaaccctctgtagagccgacaatcaaccagagttcatgcagaacctaggttttgtttctaatgcgggcattcctgagctctactcgttctccagtcagatcgagcctttcttactggcagagacccagcagctacccaacaatggcaatacctctagtatacgacaagaagcgcagcttcttaatatgtcgggaacccccaagcgatgacgtgatgtggaatcactccattctaatgatctggatgccgtgggaacaccctgtcgccgctggtcggcctcgttggcctctgagtctgctattcatatgggactctggactagagctatacatctagttgttggctcgcatattatatcacacattcgaagcctcaaaggggagtctcaatttgtgtctgtgtgtgttgtgtaatgcgcggcgcatctctacaatatacaaagctattccaggctaggcaactggtaataaaagatatcctctatgacacatatgaaatcactagtctacaaattcatttctcggaaggatgagcgcctttacaagaggacttctacatgaatccataaaagtttcccacaaaaaaaaaagagtatatacagtcacatatcccaactcaatcatagcgcagccttagcctccttttccttctcctcgaaattagcacaaacatgctcaactgcaaccttatacccgtataccccaagaccaacaataatgcccgcagccttatcactgaagtacgaatgatgtctccagggctcgcgcgcatggacattgctcacatggagctcaataaaagggatactgacaccgagcaaggcatcgcggatcgcaacggaggtatgcgtgtatgcgcctgggttgatgatgataccgtcgaccttgccacgcgccgcctgaatgcggtccacgatggcgccttcgtggttcgactggaagctttcaagaacagcaccatggctggcggcgacctcgcgactgtttgactctatgtcggagagcgttgtgtgtccgtaaatgtgtggctcgcgtgtacccaggaggttcaggttagggccattgattaggaggatggatttacccattttgagtggtttgatatccgaattgagggattcgatggtatttgggggattgtgaaattgagagactggatatttcaagggttataagattgaaggtaagcaggttatcggatatattcatgttatactcgtctctccgcattttgcccggcccggcagagcgctttgccgtggatgattttttggggtcaactaaatctttcaaatgtctaaaattaatacagaacttttactaggactattagggtaaaattcaattaattctttatctgactagagggaacctggaagtcgctgagagaacagcagtagaggggacaacaaaccggagattgagagaaggcatgataccggtttgtataacttatgtttgcttccacatgtttaagagggagatgcacgatgggtagtatggcatagcaaacaagacgagagcaacctataacaccacctaccaagtaggccagctagcaagcatgggactaaaaaacatcctttaattcagttcttgtgcgccgtcgagtctccctaacatgacaaaccagggcaacatgatggtccgagttcccttactagttacaataactaggaaattgtaattattatttacactatcataggctgagaccgagctcatcttcaagacacgtatggagtgagaaacttcgtgctcacagcatccggaagactatatgtaggcacaactttcaagaccagtgaactgcctttgacgtaattttattcaaaaaataggaaaacctagggaaagacagaaattacggtaaaaaagaaactatattaacctggaaacaccccagctatgacgttgttgaaagacaacacacaagaccacgagggaaaatggtcaccacaatgcaaaaaaagagaaaccaccatctatatcaacagttaccaagacttttgctccgatcctgtactgcaatcggaagttgagtgttcctcttttatctatctctctattttctcttgggttggacctcttggcccaacctcgtctgtggtcgtccaggaccacaactttgattatttttcatcggttagattcggtttcgacgtaggctgactccggggatattgttgaatttctggagtgccatgttgagtgtttcttgcaattgcaagaatgaggtaaaggggtaggtgggattgtgtcaggatcatgaaaaaatcatggcgctgacagtgttcgggaatgaagcgccgaaaaatgccgtttcatgaggggattggaatccaaacggggggactgcgaatggctttacgcctccgacgcccagcgggactcgcgcagcggcatctcctcgccagcttgcttgcggcttccgtctacctcgcgcttccacgcgtagtactcgccgagacgggtctcagcgtaactggcgtaatcgaaatcgatttgggagatttgcgcttggatgagtgcccaaacacccctaggagatatgattagcatgatatcaccattatgctgatctttcaattttgttcgctgaactcaccagtaaagaccgggaatgccacggaagcggtcaacatcctcgtacagccggtcgacaatctcagcctgggacgaagcgtcaagaccgcgttgttcacagtagctcttcgtgtactcagtaaggaactgacggcgcacagactttgtcggcatcatgttgtaatcgcagtcgtagccaccccactcagcaaggtggttcgatatatcgaaggccgcgggtgcaggaaccgcatattcataatcgatgaaattgacaggcgcgacaccgtcttcgggggttgggacaccgttctcgcttggaaggacaatgacgttggcgcagaggagatcgcagtgcgagaagacgagctataaacccagcgattagccatttattcaacaaagcaatccccgttaccagcaaattcaggctaggagccacataccccgtcttcaccaatccccttcccgtcgtccagcatatccaaaacccactgcagctcggcttgcaggctcaaccggcgagcacgctgctcgggtgtggtcactggcaaagccagcacccacttttgcagcacagcccacatagatgggcccgcgcgtcggggcttgattacagtgatctcatcgtcctgggagttcgcaatctcagccacgggagcgtccttgtcaggcacggctgcgctactaggaaggacggcgtgccactgcgccaagcggcgagcgacaccgcgccagatgggcggggaaactagatcttggtggttgcagggtctgccgcgaatgaagcggtagagcaggccgtttttgaatcgagcgaggaggggcggggccaggccacggttggccaagagtgcgtgggacttggtttctcctaagaataattgatctacttcagcatatgtcgcaatgggcaagagaggcgcggaggggctttgttttgttggagaagtgggaatcttgacgaagattgtccgtcggggggattttgctcgtactttcgcgatctatgaggatctctgtgccatttccgtacgccctcatcagtactgcctcattgtctatttgttcctccgtcaggccgggtttcaggttgataattttcaagagctaggggctgttagtctcggtttaattccgaaaagcttattgctggtctcatgggaagcaatactgggaaagagggacacacggtgttggtgatgccgtcggtgaaccgcacgaactcaatgttgttgtcaggaccctcccagtcggggttgagggtcagaattagcctgagagcagatgcctgggagtcctcatgactgtatgataggggaatgtatcggaattctggcaagggcgcctgagtgtatgtcgagcccatgttggggttgggtggagcggaggtagaaaaggggtattggcgcaagtcggtttgtgtgccaggaagattttgtgctatttgattagttcacaactgcttgacaggcacccctatatcagtgacgaggtcctcgaattcaagatttaggtaattgcacgaggccaggctgctagcgcagggtgcgaatggcgataaattctagaacgaagtaaagcacaatgtggaaaggcggattctgtattatggcgaaggtacaaaagattcaggggcgaagaatttgaagacgctatcgatggcggggaggtcaatgaaacaacgaggggaggtctcgtgctcccgacccgtgattggaagatgggacgattttctggggcctagggtacattcttgagggcaaaagggacttgtccgccgccactataactggtagtatatggatgtaataagttgtggttctttgaagatataagcctattggatacctataaaatgatttcttcatctcatgctatttgtttcaaccgcaattgcatggcgaagtcgtactaaaacatcttgattgcgcgaagtatgtacgatgtacattgctttcggcaggtccaagtcacggggcaatcacatgaaagacagccttgaagacaaaaagagggtctatggtcacatgcacgggccaagccctgagcttagccctacttacctaatccaacaaaatccctcaacaaaaaaagcgaaattagtcataaaatccagtattagtcaacgaaatggaaaaacccttccaccgaagcccaatccgctctagcgtatattgacttccagacacataaataggacctcctcgcccgcccctttactctttttttcttttctctccatcatcagtagaggtttacataacttaatgtaaatttcaacggggctccacaatgtggcttgctgagggttatcctatggtttcggccatcatgggttttcttccgttcccggccctggagagtaaaggcgtctctctttttcccaatcactttatggctatgctagggtatccttcgggaagccccatgggtgctagctgtggagagggcgtcacataccattttttcagtcactttgatgtgttctggaggttttgcttgctctgatcttcgaatttgatcagaggttgcagcgagcgtagtagcgttggatactgcgattttcagctggctcggtacacggtttaaatgttgtaaaaattatctacaactcatcctacaaagagcatcagaaacttccctaggctttatgatctcttgcgatgctgtatctcgccaagacgagaccataatgttctggtctttcttgccaagagatatcgttgatgtcggcatgccgaggccttaaggtatatgacccaaactaagtcactatatgtactactcttcaccgctgaagccgaaatcttcattgtcatcaccgtcataacttttagaattttctatcgtgtattttttcacatgtcaccaatcatgcatgcccagcattgccaatctgaatgcgctgtccggtccatttgtcgtcactgcgcaacaccggccagctagtgccatcggccttgatcaggctcaaatctagcttagtgcccagtacgcggaaagttgacttctccgggtcaattggcgcaaagagagtatatgtatcctggtagcgcttgttgtccgtggtgggaaggtcgaaactaatcgagttggtagcaaactcaaccttggcccgttgcttgtcaatcttcttgagatagagggagacgttcacggcggtgggagtctggtagaaatcgttcctgtaaaatgcgaaagtttgtcagtttgctgttttcaaaccagaatagcagagctagtctgcccgtatacgcacctgactgtgtccactttctcctcgcccgggggcttggccttgccaacaaacatgtgcctcgtcttctctgtgcagccggggatcttcagaaactcgtcgaactcgagcacccggcgtttgcagcaggaccaccccttgctgccctcgtggaagaccggctggcccgggtggtggacgcacttctcctcatcacgagcagtcgacccagtataggacgcaccacaacccctccgacggcatgttgcgttggcggggacctccgcatcaggatcatcagactcgggctcctcgatgactggcttctcgggcggtgccgcagtagcgatagttggggtagcggagattggtagtcgctcggacttcttctgctccgccggtgtaggagcaatgacttcctcggccttggagggttcagacacaggtgtgtcatcgacggtggaatgcttgccggtagtgcatggcgggatagagaggaattcctcaaaggtcaagacgcggggcttgcagcatttccagcctgagaagttagcggtgtcgcggggtagaaatgtagcagaagccagcggcaagatcaggtatcacattgcgctgccacaatggcccaccatgaaccgttggtggacttatgggatacagatctggcatagcttgaacaccaaggtacttacctttctgcccttcgtggaacactgggggacccggatgatacacgcagtcttcttccgggtcggtgaaggcctttccgcacgctttgtggacgcacttgcctgccatgatgtgtagcaagacaaattataaggaaattgacgggactgagtcgagagaagagattggaaagtgttctggagagttggaatggcgcaggttgcctaacagggtttagcggggaagctcgaatgttccatcgcggagaactctctgaccgcgttcgcatcacggcaccaccggccatctcgaaacaccgtggttgaattcatttcttgcataatcgagattttctctccatgtttcctacgcatttacttctcagttcagcccgcttgacgctgtttacacgtgcgggctgcggcctatgcgataccgccaaaaataccgtgcttcagctccagaaacggcgcccctttgaatacgtcgaagcggacatcatggagcccgggaataaatcttggaaggatgtttacgagtttgatgttccagtcctccacgtccagtcagttcacaatggcttgcccaaggaggccaatctctccgacgcgcgcaaattgttccatcgatggacagagcaagaagtcgaacgatcggtagatgaagccgagaagacacagtcttgatgattttacttggtgatttgtccaactgtaccgatttgccatgatccaccggcgggaactgcgcataccggggcatcgacatcgtgatatctcacccgcaatgcacgtcgcgcttgttgtattatatctgtctactcgcttctccagtcctgctggccagacctatcttgccacgcacatcccataagggggtgtatttctgtatgtattcgatctatctttgaccgtcaggtggatgatgacagatctacctaaataccctatcattgtacaatatactccgtatgtagtccctatttaaccaggatgtcttgattgtcaaataatacttgctctataattacaattgggtttcccacacaaatgcctcaatactccgaactcgtggcatacctatctagtatgtcacagctcagtcattttatctcgtctcaaactacccaagtggactgataattattatatgcacacgtttacaatttccttttgtacatatacgtagatagggctattatcgagggcatccaaggtcaagtataagtagtacatatagtacggagtaaatcgatatggctaggcggtaaggaaatagccacccttggttaactaactcctaatgtactcagtacggagtagagtagccctttccagatatcatcgtcactatgcaagaagatgcggcatatcattcagggtctctgatttgatgcggtgaggttggactgaatcttggactcttgtttcaccttcaatttctcgtcgaaatccgagtttcacaacaatctgacattgtgaccctcacggttctgccacgcgactctacgcgttcccatcatttattcctcggcaaatcattccagaacaagatatttttgaattccgtagtaagcggttctcaaatccgatctgtggtgctggcgtaacatctctcgcgcgcacagtgcaaataattgttctcgcttcactgtgacgcatgtacttcgcgaaccaaccaacaaccatcatcttcatcatattcagttccacttgatcggttgaaaaagttcagttattgatattggtgagtgtttttcttgaataaaaggctctttgtttgtggctttatgaggactacagtcaactcagaactatgatcccaactccgagaaacgcagactaatactctcacattcatcaatctaattctttactcatttgattaggtagctgaagccgataatgcctgatcaaacgccaatggcgaatggcgccgacatttcgcggccaccatcggcttcatcatcaaggacttcttctgtacagtcaatccaccctctaagatttaattgtacgagatgtaaggcaaaacacaggcgctgtgaccgaaatagaccaggtaagtaccccttgacttgatagggcaacacaattgcaggtgcattgatgactgactatttgcatagtctgcaacacctgtcggaccttgggccttgaagctgaatgcttatatccttctgcggccgtagcggggtatgtctgtccgtgatatcagcttggccgagtcaaaatgactaacttatatcatctagtgccgagaacataatcaccaagaaaactggtactccattctcagggccaatgttcaataatgattatgctttacctgctttacccacaacaggtgacaaaagaccaagagctgcagacagttcttctggacgaattgaacctgtcaatgacgtggttggattacccatccaaaattctttcagccacacccggcagacgcagatactccagcagcctgctgcaaagcggtacaagatatccgaacttagccctgcaactggaaaagccacaagcacacctgcatttgaacgaggtcaaattgcaccatttggcatactcagtgggagcacactggatcctccaccgcgtatgcgtagtatatctcctactctgcctcaagacgaaatggagctcaggtgcaacttgaccaccgaaatcaatgtccagagaatgaaggaacaccgtcttacagcagggcatttgcgtaacatcatcaagctactcacgaaagccaagaccgagcgcccaaccactgaacccacgattgccggatcgagtgctatactgtttgacgagtatcgtgaggaagatgatctcatgaggtttgcaataatcaagctgaaaaggggtggccaatgctctcgtgctcttctcagtcgatttgagaatttcgtatatggcccattgatgagtcccggggagaagaagatgcaagagcgtgtcatatgcgttgaagagtgcctgtcaactaactcggcgtcactgacagtcgatcataccgacctgttcctcctccgccttaaaagaatcatacttcatcctgatgtctatggcttagacgagaatgacccacgcatcgccttcctgcgagacgagctccttacagccatggcgactgactcgaagctgagtcgtccaatccgtaggaaattcgcggaacttttagacccagatggagagattgccggtatcagcgtagacaatccaggcatcgaaaaagaaagcccagagtcgaggaaggtgctacccaagcctacttcttcacgcgtgccttcctcgcacgcgccagaaacaccatcgagaacaataacaacaagcaaacaaaactctgtcactgctctgtctccttcaccgagccatccctctcttttccccccactctctctttcaacaacccatcctccccctgtctcctctcctatttcatctttatccccaccacctctggaaacgattgatttgaccaatgataccatgtcgtcgtcatttcccttcatcgtgaagcgtacgcctaagaagcgtattgactctggcagccagtcgtcgcaatccaacagcactgcagcgtcgcctttcgtagagccagcttctaagaaacgtcctgcttctggcgcgcagtcgtcggacctcgacaatgttatcgctccgtctcagaggcgttctgctcctagcagccagttgttcaactccgacttcccaaaaaggctctggagtatcttccttgggaaacaggcttttttcttgccaatttttgatctcgaccaactgaaaatcgcttttaacctggccgtaaaccgtgggaaaattgaccccacagtcattgacccaactctcgggctttgtattgcaattgcctgccacctggctccttatcagaaccttggggaagcccgcaagtggttcgatgcagctttatctaacatggctgacccaatcaaatctcgaccttcacttcaatctttccaccaccaaattctccaggttcactatctccatatggtcgggcacttgcgaatggcttgggacatcttatctatggctataggcagagcgcaatctcttcggatgcaaactatgcatggtggatgtctcgccgtggacgaaaagtcgttggagcaggttcggctggtatggcagtgtctctggacgaagaaactattcctcactctccagtttggcgtggtcgatcaatccctcgacagcttttacgacccacccatgccgatgcagtcgcatattactgacaacatgggagtatctggcaaccaaaccatcgaacaatcctatacgacgtcttcttttttcattgcttccgcttcccttattaagtgcactgacgatttgatcaccgttgaaaatgatctacgtgtgactcgcatggaatgtccgatcaaatggctttctattgtagacctacgtggcttccaaggactgaatgagagactctcgagctggaagaacggtctgcccaactgcctggaatggagaggccctgacatcgaatgtgctatgcagaaagaccttcttattcgccgcatgtccctcctggctcatgtgcgatttgtctatttccgacttcgtcaataccggccgttcttcattttgagccttcgactttcccaaacgtgcgcctgtgaaacgagccctcatatcactggcaaggatatcgattcggtggatgcgtctcctgtgctcggcctagtgtattacagtgctgtcaaatgtttgagtgctgcccaagacattgtgaaaactttatctgtatccttcaccaccacagcagatgagtatgctaagtgtgagcagcttgaatatctctacgctgctgccctcattttgattgctgcccggacagttccgcttgtcttgaacggtaccccgcggggtatatctgctgtatctgctgctgccaccacggcgaagtccttcacagcgatgaccgaggagctaaaggaaattgacgtcttgttgcgcaactaccaagagagttgtaaacaagccccaaaattcgaacagagaatcgcacgttcgcgtgatgttctcgaccagatcaaactacagtcagagtcatctaatggcatagtcactgacagcgacatcaggcttgagccagttatctggaaccggatctatgatagactcggcctcaatgttccattccagcgattctcagaacctcattgccccgctggctctgcgatttcaggccgtagaaaaacactcgcttggctggaaagtctcccagtggatatagaccttgaaaattagggtcctttctgtcgttgatacagctgcgctgaagcgctggcaatttcactgttctgtagggaggaatttacccgtggatcctttcatttttagctttgaaaaatgaaatccctttctaaatggttctttcgatatgtagatatgtggtatctggttagtggttgcgcttgatcgtggcagtctaagttgtaatggtcaaggcttcgctagagttgaataggagatccaagaggtacaggactggctagggacatggtgcgtggccttatatagcaaaccagcggaaaataataatgatcctacgtggggggattgaaccctggctggttatggactgatgtgtcccaattaggaaagggtgctatataggtcacattaaagatgtactgttacttccaaacccaccccgattagctcagtagatgggggctctgaagttctcgcttgggatgctgagagtgtatatcttcaattggtttcggacttcatgaccccggggcacagttaagatcaggctgcacctcctaaggctgaacgagagaggatggaatgtgtcgccacacctgcagggtaattgaccggggccgaagtccgaagggggtgtgcggtcccaacggatggaagttcgtgggtttggaagccctcttttctttttctatattgacattacttttcaacgactcacctagtgttttgtcctataacttctcgcttgcaaccagccacacggtacacaccctcgttgctgtgttctactcgagcctccaattatccgttgcatgctgtcacatctgacttgtaaatcgccacggaagaatgagaagagaccttgaggtcccgagacggtcgccaacttattcaccgaggattgactccctcattcctgtatatttctcgttcgacatctcattactccccccgccaggcaatttgggccatcacagcatttccccttcgctcagaatgtgttctccatacaccaaccaggctaacaacttcgttcctcgcatggcacagaatggtcatttgaaatcaagtacaagctattcatcaccatctatcgcagataccctccgctgtggacctatacctgaggagcggtggtgtcatcgacgttcagctaagaaagtcagtctacagggaaggccattggtatggacggcgaaggtgagactcttacttctatcaatgacttaagatacccggctaagacaaatgacacagagcatgctgaactcgttcacggaaatacagagaaagcgggtgcttgcaacgtatctttcaccgaagtctcgatcacgtttatccctctaccagactctagcaccgactgcacaatcagcaactgcgtgttaaaccctgttcctacacctgacaagcaatcttatgttcagctagatatcccgcttgctgagacccggatgtcgtgttgccatcagtgatatactggctcgaaaggaactcatccaagaggtggtcaacagtctctaccacgcatactttgagatatactgtcaagacttcaagtagtacttgattatacaccctgcatccctccggcggactgtttccttgtgtaaaatcacgctacattcgaaagtacatggaatccaattccatgcctttgatatttcattggaccaccaattgacaagcgcaagagcacggagttgggtttcctattgattggtgagttttcaagctactagccaatgagcccgtgatcttaaaatcgatagaatctgaaggctgtgcatgatattttcatctgtaggcatactgccgatactatattggattcactgtcgtcaatgctcctaggaggtgcgctatctctccaaacaatcattgatagtatatattaatcattccaactaactcgtctagctatcaatttgacagcatataccaatcctaatagcacaggaacctcgatcagaggcccaacagtcgcagcaagagcctggttactatccgcaccaaacatcgccactgcaacagcaatggccaattcaaaattgttgctagcagctgtgaagctctgcacagtcgccagcctgtatccgaatcccaatttatatgcaacaaggagggtcacaaagaagattatcaggaaataaacgataagtggtgctgcaactcggaccacggatacaatttggtggaccacatggcggccttgcgaggcgaacaagacaaggatggtgaatagcaggccgatgagagaccagggactgatccatttgaggaaggtttcatcgtaccatttggcagaaattcgtcggagcacgaaccgcgtgacgattgcggcccctagaggtattccgagaaacaccgcaacacttttagcagccgttgaatattcgaatgtgactggatcgccactgatgacgctgatgaagaacacccccattggagcgaaaagaaccatttgcagcactgagttgagagcgacgaggatggcacaatattcgctatcgcctccggctagccctgtccaaactagtacctggaagaagctagcggttagcattgtctcgtttccaagagccgtttgagtggtgtcgacttgccatagcaatgcatcgtgccaatccaacaatgatcagcccctgtcgcaattctggctcgtcgggcaaaaaagcccaagccaaggccaactagtggaaccaagtcagtgagaaactccgtgtcatggaagtgttgggatcacggaccataagaaaaggggcaataatccagttcagaaaaatactgaaggcgatctggatccaaatatctttcgctcgcaaaacatgatgcagggattcaaaccgaatcttgcacaagatagggtacatcatgaccagaagacccacagctagaaatacatattcagttagcgaaaactacaaaatcattgctggtttcttgtgcgtaccaatggggacagagactcccacaaatttccccctttgtagggcaggtcctgtgcttgggacaaagttgcccaggatgattccaattgccatggcaagaaaaatccatattgccaagaatcggtcaaggataccgagacttgagaacatggattctttcttctgtggctcatctggagaagaggtctcccgttgcttttcaatgtcgcatgtctttatttggtcgttgggaggactggacgtacatgtctgtggtcgtattgatgtcatggcgagtgaccaagtttgttcggttaatggttgatagaagatatagtggtcggatttgaagatgtagcatggaatttttgtattcgtctagatgtgtccatgaatatttatatttgtataggtctagatggtagtggtatgtcactgacgggcgctgattggctgaagtgccaagccgaggccaaccaatcagactttggtagtgacattcctcataggcggcggggtatccggggtattctggctgcagagccaaccgcctgagtgtcaaatctctcaaacctcaagctcggaatttatcttgacataatgtcagccgagcttccatggcatgctgcatatcccgcaccaaggggcgcggcaccctccatatcacgagaagagctattgcaatggatccgagagggtaaacaagcaggcaaagactttgtacttgttgacttgcgtcgcacggactatgaggtacgaactgttcgaaaaaagcgacatcttcatgcgctgatttatcaaaagggagggacgatccaagggtctttgaacttgccagctcagagtttataccccacgatcccaacattatattctcttgtgtcgaacagcagcgtgaaatatgtgatttggtattgtggtgagctttacttgatacatatgatagcgatatcttgaaacgcgaatactgatctgcattcagggtcatctgggggtcgaggtactcgtgcagccggctggtttgcggattaccttgaagatcaacacgataaagagatcaagagcttggttctcacggggggcatcaagggatgggcagcggctggtccggagtatacatccttgatgaatgggtatgatgcctctgtttggacaaagtagaagcactcattaaatgacatgatgtttgtcaagtttccatcttataaggggtctcgtaacttgaagagccgttttaccaagaagatttcttcggatattagttatgtgctcgaccacatcgtccgattaggtaaacttcttcggtgttatctcttcggcgggtgtggtcggtgggatgtgatatacatgcctcgtctcgaagtagatatacatgtatggtagccgttggttgagacatggtcccacgatccaattggatttagcattgtgcataatgtgcaagtcaccttacaatgcaaggtgtgttaaagagagtataattaaacttggattaacctagcgaggcccgccatatccaaacagtctcagaaagatcctcaatacaaatttccccgggcagtattcttttatgcagattctcaagctaaatgggtatatttggagctattgacgcccaggcacacatttactcatttctccaaccccctccaccagtgcgctctgtgaagttgctcttcaatatgtcagtaacattaccgaggcaagacataatgaataccaagggtacgcggactagatacctgtgttcaaccttattcaattattggcgagatgagggtgcgaatgtgtttcagagaggttcttatcaagggatgcacgtcgcgtttcttgttcttcggttgtaggctcaaccggacttggagcagcgacctcgctcaaagcgccatattcatctctatcatcatccccagtatctgtctgtggcttgctttctggtttggaacctgaatctttcttacggccacaggtgaatattcgctggagtttggaaagcgtcatattatccaataaatgagatcaaggcgaaagatgctgtacaatgtaagaggagggtttccaatagaccggcaaccaagacccaggagactataaatgattggccactttgctacgtcatgactatgaaggggtgggcagattatcggatacgtttccgagttggcccgagtgttaattgggctgaaattgtgtcgatgatcttcagattcgaaatgaggaggttcatcgtgtagtccgtatgtcgttgcgattatctcggacctaacgtgccgttgttcctaactccgaccttggcattcttgtctcaaccttccgccttgtgacttcactccctcaactatagttactttcgaagatgactctccaaattgatcaaccgcctcttgagcaaataagttcagaagattcgatggacatgttggatcctctggctcgaagacgactacaaaatcgcctcaatcaacgtgcgagcagtaagtggcacttttatttgccacccggcattaactgtgcagactaacaccatacacaggaaaaaggaaggcgttagagtataaagagaaaagcaatacggcagaaaggaaatgggttctctatatcgatgattcgaacatctcaaaaaagaatgcatccacagaagaaggaacaagctatcaagttactcaatcatcgccacctcgccaaaccgaagtctctttttgttccctgagccctgcccagcatgctgcgcttatgaacaaattccgtgcaaaagctttgcatatgattgagaacccgaccctcctgcgaaatcccacctttagcatcacccagtacaatatacttcgagctatgttcatcaacgccgatctcatgggcctcacattagagcttctgaatgaagacctcgcgtcgcagttcaatctcaccggtccattaatgtcagcgctacatctcccagcaagcttgtgcccatctcagaaacaaaagaaaatcatccaccacccctggatcgacttgattccaatggtatctctacgggaggccattttgactagggcagatgtaattgacgaagatgaactgtgcggcgatttttacggatcttctccttcccaagaagtcgggcttcgtgtttggggcgaagcttgggatccatctgcttatgagatctcggagacattgatcaggaaattcagttggatggtaaaggactgtcccgatatcatcaaatcttctaatcactggaggaaacagcgaggggaaaagcccatcaggttcaagatcaaatgatatttcaatgcatttataataaacacatcaaattcctttcaaatgtctattccttacagcgaaaacttctcctgggtcagtttttcgctgagttcccacaatttagtccaattgccttcgtcgctgaggtgcgcgtgcaattcgtcgtctgcgactgcgttccggttgatgtatgatccattgtagcctgggggcaggattagtcgaagacactataaaacgggttatgggaggtgttctgcttacctgcgatggtagggtcgagcattcctgtgatgaggccagcggctccctctgaggcagtggaccatgggggcacttcgaaaggctttccttcgatgtcgaccaaggctaagagatcgtttagtgaggagcagaaaacattcaacaatagggcaatccatacatccagcctttttccattcttcgacctggtccaaaaagtcaggagggcagtgtcgttgcagaccggttagaacagctaaatgatggtcagctagatccacctaaatagtaagaaggagaaataagacataccaccagggtcaatactaaaaacgcggatcttctcgcccttcaacttctggcctagtcttttggcaaacatgactctcgcggcgttcgactgggcatacgcgaccgtagggtcatatgtccgaccatcctacaaggaaacggaatgtcaacgtggttgaatataacgggtaagtaaaacttacactaaagttgtagtcatcgaagttcatcttcccttgtttagccatgcccgaggtcatgataatcacagacgaatcgggccccgcagcacggatcttcggtaggagcaatttgacgagcaggaagttcgctagatagttgactccaaattggctctcaaatccatcctttgtcttggtgtaaggcgggaacattactccagccacgcatacaaggtgatcgatgtgaggcacatctgctaggtctccgacggcgtttcgcacggcggtcaagtcactcaggtccaggttgaggaagcgagtctccacgttcggcttggatgacttgattttctctctgatgcctgccacctttgattcagcacgggcactcaggatgagtagttttgggtcggcggtggaaagctggagcgcaagttctcctgcgatggagttgtcggaaacgccggtgatgagcactgtgatgaaggagcctctgtcagcgcttttttcttttttagatgaggggaatatttgattacctgtctttccggcaagtgccttgccatacttctcgaggacaacctcagagcggaggatttgctgtttgttggtcattttggatgaaggtgtttggaaataatgaactaagcaatggagaaagcaaagaagtcttgattgatatatcctccacttgactagacacaacagtccactttataccttttctttcggcgataatgggattaagtgtttttgaaaggcatcgctagtatagttcagatggaccaatcatgacccggggaaattcccactagaggtcatcccttgccgtatcgggttagcccaatgtcatcaagtatcagattgtttcttcaataattattcctaagcaattagaagatgatagaacgtaatggggatatactaaggacttaagatgaaatatccgttaactcctactacagtcttggctctatgcaggcgagattacatgttagaacatgttgaagtaggatattatgatacaattgcactttgataatcacaaaatagagtacagtaaactaactatagctgcacaatgtattccttttgagaacgagggaaccgaaatatgtctaaaccaagagaacataatcgatcaaacggataaagccacctatggtgcacatgtacgatctcccctcattgtacgacttgtagaaggattgccaatttagtcatgctattgaacaattagggagcaccaactcatattaaggaccacttaggggcaatagtcatagattgggctaagtacaagggtgaaatcactctgttgaacttccgttccttgccttctatcggcaatgactcggggctcaaacggagatgggttgcattgtagaaaacgccagtggcaatgattttagaaagaaacacaggctattgatctcatcgttgggtttttgggtgtaaatgggcaaattagaatgatatccttggaaaactcctcgcgaaaccatggaaagagccagagtggttgaacaatccgcgacagccgaaagatcggtgcgtggttcctgcaagacccgaagagcccttgctaataagaataagtatgtccttagcagagaaagatccccatttggcaatgagtatatcataacagactcccgtgacttgactagatagcccgatgcaacaacggacctgttgacggaagactagagacatagatttgggccaagacgagaaatggtaaatgtgattattagattcaaacaggaggctaatccagagccaccggcccgattgtctacacgtattcaatacaatgcgccaaaccaaataaaacaagaaaaggtcatcacacatatcagcgggcaggcatgaagtagcagtgccccaaaacagcctgctctagaaccacatgatgcctgcaacgagaccgatcacaacggccatacagcttccatggagctcatgtgagtgccgaccagcggcagcatcggtggaatcctcagcgccaactttttgttggggcggtgcttgctcagatgcggtgattaggtcttgatttgaggcggcagcgttgggaatcgtggattcgggtattaataatttagaagcgccgttgatctgctccgcggggaatatcgatttcgcataatttgctccgtggagtccgacgcgctttccaaaatcaatggtgacatgacaggcctgctggaacatgtcgcggagtgaggcaggagatggcaacaatggcgtctgtatgctgtcggaggaattattatatgacaagatgtttggaagagattcgatgtcggatgcggttggtagggattcattgatggtgatggtagaatccggatgcgtcaagcccgtaactaggctgcggttggaaaatgaggcgaggaatgggtagtcgtctaattgctggatgaagtaggttctgaatgcgcgggctctgcgactgaatgaaaatgaggattcgcgggttgacgatgcaagtcgacttttatttgcgacagcggtcgtttcgctgggcgggaccacagcggcatttccaacccgcgcagtaacgggtgggcgattacctcgcgatcgatgtgacgcagcaagaacccatgatttgcgaggctcgttgagcggcggtgctttcggtgctaattcggtgacaccatcttgaaggagagggacatctagacagtcgacttggttagttgactcggatgagctgggtggcggaaagggggacatacggcgaactgcgccggtgtagaagctgaagtccgcaaacttcgagtggtagagactcggtagtgacggcaccaatgtgagaagcgaaaacacaatgaggatgaggagtggaagagcaccaggtttatccaagccagaccgcatcgtccctgctccctggctccgtccagaagcttcggagtggtgttttgaggttcagacttcacgggaatcgaggagaagcaagaatgacagtttcaaggccatggaggggacaagctcgggtgtttcgcggtttcaatgcaacgttccgtgagatgcagtgtttctgcagagcaacgcgccgacgcgcagggggggctggtctatctagaaggtggccggggacgagatttaggagcttgaggatagaaaagatgcgaggagggcacagatgcggtgggttcaggtggattcgacggggttaagagtcgaatgaagcacgataaggagccctcggggtaggtggatgcgcttccttggctcttctcttttttttttttcgcacagagccccgagtatgacgtcgatgaccgttttgtagaacaaaaacaacctggacttatttgaaatgtgccgtttgatctggagtgtataaaatccccctctgccgaaaacgtcgaggaatgtttcccacgttggccgcattttgacagtttgagggtttcccttccaacaatgtgggcctgaggcatcaccgtccctagcaacatgtcgatcaccaaagagaaaaacaggattctgcattaaagatcctggttgttcagtagttcatcgactattttatttattattcccgctttagccctcgtgcatagtgtgatgtgcgctaagtctattgctcgtggcaaccggtgagtaccgaatgtcgtgacggagaacttccagtactccaacgaaccatggctcctaaccagcatatatacatcactacctaggtatatgataagtatcggtgagctaacaacttcatatgtagccaaagctgctgaagaagtgggggttatttctggctatacataagtaccccgataggtagttagtcaatagcatagagcgcaaaacatgtcattccatcgtcacgtgaatgaaaatcatcacagcgtagcgcatatttacaggtctcaaaaagaaatgcataatgttatatacacatatgcttggtaaaagcgaaagccaagagaaaaaaataaaagaagcgaaacatgccaaagacaaggacaagaatcggagcatcatctcttctttaatcatgcacattcccgtctccattaaaacggattcatcatagaagcatcaggaccagccggccggctctctcccccacgaactccagaaacaggagtagatttcgtcaccggaactggcgaaacggtagtcggcacactcacatgactaggtgagcgactactgcgactgtgtgagccaccaccgcgggagacactgctcccgggagtgccggtactggaaccaggcttcccgccgcgtttgaccatcttccccagcacagtgacgatctctgcggcgtcttcgaagctttcgtcgtccatgccttcttgggaattgtagacgtccgcgatggcctgttttgcgaggcggcggcacgcgatagggtcttggaggcagtcatatagataggctgcgtattccagcttgacggagagacgcagagggtgcgagcctggtaggagtttgtcggagagggttgctgcgtggttgaagcaggctgttgctgtggctgtgtagtctaatggggggaggaggaaggaggagatgggttggggtggctgaactggttgcagtactggaaggcctggaggacgggatgttggtgttgatgccgcattgattttggacttgtaggggtgggagacgccgagggcggttagggtatctgcgccgtatatggagtcatgtttgaaacgtgttggtatgtcggtgtcgggagtaaaaattgggcgactgtggaataggacgaagatatggtagaaggaagcgcggagtttgtaggcgagcactttcagctccacaaacctgtctaccatggggaggatgtagccctccagtattagtaggccttcacgggagagccatataatacgatggtacagctgaagggatcttgtttcacgtgttgtgtcgagtcgccgcagcttgcgggctctaagaagcttttttgatagcatgacggagactccgaggactttgtatagcattgccgagagcaagggattttcgaggtccatgacggccgcgaaattgcccagggccttctgatccacttcggaggaggccatccataaagcccacgacccggaaattaggaagtctgtatatatcgagtcagccatgttggtcatgagtctcaagcaacaggcgtaaaggttcggggaagaccaattggccgagactcaattgcgaggctagaaacccctcaacagataaatgaataggcaaagacaacgccaacttaccgaaaagcgcgcaaacagaatttcaaataaccaaacgcagcgactgaatcatgctccagccacgcgcgtatccccgagccgcggaccaattgatctacgagatcgatcttggcgtacaaaagtccaaactattccagcgatgcgccggagccacaatacggaatatccgaaaccaaaaacaccaagttccgcgcaagctgcaaggttcagctggaccgagggggcggcgattgttcagaccgcggagtatatcacagccaatggctttagtttctgggagcgggcaccaaatccaattgcgacaaccgagtatataatgtttgaattgtagtaggtagtgcggtccgcgcgatcaaatcaatatttcctgttttgatctagcgacggccgagttttgaatgtcgtattcacgcggtgtggtggctgggaatccggctagcaacgcaaggagcaggcaatgaggtgacggagctcgtggctggattggaagtagaaacgcatcgtgcggcggcaaagtagggggtagagtgggcgaatgcgacgattttcagtgccggcgaagtctgtgcggggaaggaattggggacttgtctcgggtatgaagctactagcccgggggctcgagctagaagtgctggggggttagtgttattattgtagatgttcgggctacctgtagggagtcaagcccgtggattaaaagagaattaggaattgaaagatattcgcagactgcaaaaatgcaaggtcatgctagctgcgtggtttcccctgatatgacgaagagatcgggttggactcgggataggtgtatggagtattgtatagtaatggttactagtctgtcttggagtcccacagtcagaacagaattgtacaaaattgtacagaattcattggcatagatgtgctacgagtggaggtaatggactatttgtataaagcagactcagtagggtgcaattgcagtgcccagtggcaacttctctcactctagtatattaaatgctgtgctgtcctgcactagtctgagtttcgtgatgtcaattgatcctgttaactccctagtaatgccaggtttgctacgtggcagcggctcaaggcgagagacaattagggcagcatcgcagattggctgggcactgcctggctaaataggtgcccaagtcctcgggccagattactttgaatgtacctgggcatggaaaccttagcacggactgccacgctggcagtggctgtgattgtgtgtattggtattattagtgtagttatgatagaaatccacctatctgatgtgatggaagtgagaattgtatgttatagtgttcattgtacaaccttggacatccattgatctacattcactatagaagaataatacatcgttgatatactacagctctgcaacttacgttgtgttctcaaattaccgtatctgagctgttacaccgccagaatgatgcccctgttgatcgcccaattagaccaatccattgtatataactgtacagtatgttgcagacaaattggtaatttaaggtctttttcatttgactgtaatttttacgcctgttttccatatccaacgacagccttgtacatagtagtctccactataagtctgagatgcaagctatgtatcgtgcatgcaagagtaaccaaagaaaaaaatgctaaaacaaaatcgccctattcatctaggtcatcaactgggaatccaacaaatgcgcgcctcaagaaaacccgccagatatcgttcgctggcttcttttgcttgctagccgactcagcgccttggctattggcatcgctggtgtgcttttcttcaactccttcctcggcaattctagctgcgagttggaagaagctgcgtactgtcaggtctttcatttgatacacgtcatcatttgtggtgtactcgatctcgtagtcaagacgatgatcgtggcctcgtttgcctgccgcgatctgttcgtggatttttgttaggtttgagtaatattgagtgtagccaagcatcgtaaacgcctggttcgagtatgccggaccgggaggggcggttggcgatgggggctcggggactttgaaattgggtttctttttcttgtccttgccctttttcttcttcttctgaatttcgggtggtattacagagtcgtttctggtttccggtggatgaactgcagcatgatccagttcaaacgttgtatcgtcaacttcacgtccgaacaaatccacaccatgtgtgacatcgagtcccgtggtgttgtagtcgatcacgcgcagactggggaagaaattcgggaccaaactgggagacactagcgatacgctgtatcgttctgcccacgggcctccaatcttgtccaggaacttctgcttcttcttcttctttttacccttcttgtttgttccaacctccggggagatatctcccagatttgatatgaagtcaagctccttgaaaatgtccgacggaggagatggcaatgaggaccattggtttcggagtgactgaaggtagtcggtctttgagctgatcgacagcttcccgttgacatttgaatcaatgtcgaccttgttgctatcctggagcatgaagtggtcgatgttcatatggccgtaaaagctgccgacaacaatgtcacggtactggtgcatccagagcgtgtatttttgccagcatgtttcatcccagttctttttctcgctcgaccgggccggggggacatggcccatgaggatcgctttcatattgcgactgcgcaagattttcaactgcacccgcaaccactccatgtgctcgtatccaggttccgacttggcattgcatccatccactgcgctgttggaatcgaagaagtacatggtgtttaggctgatgaccgctagccgaccggggatcacttccgtggtgaaccaaccgccctcgacgaatgtgtgacgctgatcttctgggataaactggtcccatatctctgcaaatcgctttgtccacttgttcgggcccttgttgaagatgttgtggggcatgatatcgttattaccgaatgtcgggattacagggatcgacattttaggcacgccattcgaagtcccactaaccccttcctcaccgaaaatgctaatccatttttgcgacaggaaggcattcaaatccaggatctcatctgccgtgcgagggagcttctcgtcattgtcatgtcggacagaatcaccagtccaaatcacaaaatcaatctcatcttttaagttttcttcgatccagcgatatgtctcattcacaagcgataaagccgaatcgcaatctgtgccctcggctccaaaataccccgcggggcccttaccacggtggcacgagcgatcgatcgaggttccgggcttgtagaggcggtcgggatggaaatctgttggtcagcatgaggttacacaacagaaatatcaacatagagaactgtctcctaccagttatatgcaagaatcgtccgcgtacaggtttgcgcaaaccctccgccagctgcccactaggcagctccgttggactgagacggcccaacggctgttgtcccaaggggctggcggagatggcgtcggcaaagaggcccagcagcaagaaaattgactgcatgagtcctctacaccaactggtacaccaagagagaaatgtgggtgaagttcaggacctcggaatattttgggtaaagatcttatctgcacggtcacgtcactgggcgggcgcggtagccgaaccccaactcacacgcgtaaccaatcagaggccggtggtcaatttggggaggaatgtgaagagttgataaatggtctttactgcgaactcagtataaaattagaaagttagagttaatctgatatccaagacagccaatgacttcatcacgtgccaacggccttgaggggaccttgggagttcaggtagaaacttttcatggccagatccctcgctgtacataagaagtcctttctatctgattggtgcaaagtgataggcccgacgtgtctacttcgtactattattcccagtagtattcttcgttcacggtgtatgtgatgtacacgcgaccgtcttgtccgacaaagatctccctttctccaacgaagatcctttcctcgagtgtcatggccacgtaccgccaatcattggtctagaatcatccatcaactcagcgctatgtaggacatttcttacagattctttcggcttgacgcgaaggaaaaaggggccgctgtagataccgaaagttagccgtgatcctcgatatatatgtaacatggaaagatatacagctgatggttccccttccaccttgtagcgtagcatgaatggcgtccgcagtgactgtcaaatgaccacggatgtaatgtgaatcaactaccgatatgtaaataggtgaacaggccaaatgatatttgttgaagttatggctcacgccgttgtctggagtcctggagatagaagcgatcagcgaaaggctggcgctccgggtcctcctaaacatgtgtactttaacatacatgagctggactgttgcgtcaaggaatgtctcctcatagagtacaacatgaacgtatgggctgtcgacattgatggcagttgcagtcacagtcgggacaaactcgggaaatgtctctatcctagctcgggtgccaggctattcagataggcaggaatgttagtaaaatgagggtcgttcgggatgagagatgcttggtgacttactactgcgacgaacccttcggaatattcagtgcccgctataaagcggcaaacccgtcagtgaatcagtgacattggacaaagtgctacagatatgacctaccaatttcgagttggccgagtatattcgcctgcatgattagtaaaggttatgattgcggatgatatgatggcgagagacttagaagtcgggaagaatggaaaaggaagaaagtaaaatgagaaaggacgagtggcagagggtagagagggaaagtgcacatccatccaacaagcagaaggtcgtctaaacaaacgcacatcccacggtcgccaaggatagacttttctgactttttgacatcggttcctctgtgaattaccgaggcttatacaagcatcatggtcttcactttacgtgatatataatgtgattaatccctacggttatggaaggcatatgatcccgaaccctagccacctaggcagtattatgagttatcttttaactttacataagaataatataaagccttagacagcctgagctatccaagtcattgtggtagtctcattgatagacgtacgtaggtagcatctatgcccagaagcaaaatggagttatcaacggatttcaaagatagagatcacttgcagctatgtactgatgtatatagcttcatagatgcgaccatatgcttgcgcctcctggctccagcttgacccagggcggccagaatggctatgttgcatgctttatgtatatttatggaagcaaaaaggattggccgagaaatcttccaggacacagaggacttacggccagctatatagtatagcttgatagaggacaaagagggttaccaaagaggaagtcgacaaagcgttcataaacagaaaaaggcataacaaactgcacctgtaagcagtaagcatgctagcgcgggatatgaaacaactcttagtagagtgcaagctatataggatgagcttcttgattgataacaagcataagaaacacataatattggtagtgtcgaagttgagtcttgtacatttgctgactcatatgaactgcccgggtggtctagtggtatgattcgcgcttagggttaacccaaagcattaatgcgcgaggtccccggttcgatcccgggctcgggcccattcttttttcttcttcttctttttaaattgaaggaatctaatatggaaatgctaaaagcgtcatgcgaaatgtcattttgattagatggcaagaatatgtgagggccgcaaaagttctgcagatcggccgatagaacgtacttgcccatattaaccacacccttgttttttttcgctaatttaggttgaagaacaataagtatacatagatcccgcacaaatatcctaaaatccgaaatcaatacaaaagagaagaggtaaaaaaaaaaaaaacaaggggcaaatccaaggatgaaaagagggagaaatcgataactaacgtccatgaaccgggcatgcatgatgatgatgatcatgtcctggtccatagtcttcctcacgcttatgttcataacaattcatataatgatcgaaagttccctctgcgagcagtcccctgcgctcaagtctaagcatcaggtaacaagcccatagttggcagctctgtagtggaacctctctagcctctgcttcgacagtatggatgttgtctcgatgaatttcaccgagcaagtgtgtggattcgaccgaccagctatcaaatctcttgttatattcgatctccaagttacgattccccatgtagccggtgctgtggagtcgagtgcaagactgagaatgtggatgcctcgtaacgagcatccaatggatgacacccccctgcggcttgcaaatttgaagatggagttcatagtgacgaccgtgatcgtgtcgtcggtcacgaggtgtgctgtgggcctgtgaacgtatagttggtcctcgactaggcatggttacaatatgaaaggttgctaggggctgatatctgtaaaaaggtgtgagtataacgagtatattgacgatttttttgagtggaaagattgtttgctgtgatgatcgagttaattctgagcaaggactcgatcgttcttatagatattcctcgagttcattgactcgtgggttatacaatgggctaataaaaatcctttattaaacacggattaacaaagtctttgttgcctggatgcctttacaaacaattaggctttattaatctaattgtctaacaaagactttctataatctcttccactagcctaagatagctagcgttatgtctcctatattagatgacatcgtgtcttctttgttaaaagggtaaagggttggaagaatattgttcatgtgtcatggaaacaagtaaaaatagccatcaatatacctaattcaagtcaagctttcaattcccagagcggggtaggtgaggctgagatgagatacgatgaccttcacggcttggcatcagatggatggctggtccttgaagggtttgtcgacagcattcctgattatgtcgtaggatctctctgtgcttgttcacatgatttatcttatggcaggtacatgcgctcttactgcattgaacttctgggtatctattatagcacttcgcataggatatttatacatagacatggaccgacttcttcgagtccctcatctcgtgtacttcgtcaaactcattattattcccctccaggatatcatccgtgctagaattatccggattaggtatcaacgactttggtgtcaacctccgagatctaggcgtgggcaaagagtttccaggatatgaggagctcaactcgtatgcgctccgtccacttccggttgttcctcggccggatcgtaatagggatctgatgcaaggtatcgatgccgttatgatgactatgtaggcttcgatgaatagccagcgatcgtagttgacggttgcgacagttgggtcgtcgtctgcgtgagcgaagacttgggtttgcactgctttcataacggaggctgccattgcactagatccaaaataactgcgttagccggtatatattttgaaatgaagtagggattagtggctcacaaaatgcccaatccgaggagtgtgaccaagcccaacttgacccttaacttcaaattcaagttccagaatacgtatgttgaaaaaactgccaggtaaaggtctgtggctgaattaaacgctgttgaagctgattattagtctcagatgtagaccagggcaatgaatggaagctcgtacagccctgataatacccgtagtatgcttggacgcggtaatcccagcatttgtctttcccattctgcgtccagatcgcagaaccatgtccagggcattggacaaatagaatgataatcaacatcacgttagtcacgatttgtaacccaactatgacccacagtatcactctgtgtgatctcctggtgcccagtagctgaatgacaaagacaatgaaggagatgcgacccaaagtaccgccagcaatgccgaatgtctgtgtcaaatagtcgtacatgatgacttttggaacggctgtggttgtgttaaggtcccaaacatggcgaccgaagccatatttgatgcccacggtaatcaaagctgatccgactatagtaagacactgccaggtaacaggtcagttttgatcttccaaaactattacgcgacacgtggactaaccaatgccgacaccataagaatgtcatcccagccaatcttccggatctttatttttgcaatcaccctcaagacgactatgagaatggcgatccccgtgagcgcccaaatgtctctcaggagccttgggccgtggtcgtcgaggtcgcctcgaactgagagagacatatcgctcggtcgatagcatggaatttcccacaaaaaatcagaaaggatgcgagaggcatatctacagatagacatcgatccattgaattccaaatatgcccgatgtcaaccggctatattagccttttatcatatctatactttatcaaaaaaacaaatctcatcggagatgtccatgtggccaacccgagcctcttgacccttgtcaaccctttcagctgtaacttagatagccttggaaagtataaagctgaggacgtccgtcggaggtctccgcttgaaaaagataagatatggccttgacctatgaaacctcgcaatatcccaaaattaaaaatctaggaacgagcccggtaagccatagggcacgcctcattaaaaccgaaccacgtcaatttaaaaacctcggcaattcagatgaatctatgcttccagattgattatatgctttgagaataccatagttaagagtgccaagcctccctattcaggactagtcccattttaaggtagctcttcgggtctaccgcccacgcgaccacgttatttctatcaattctattggctcagccttctatcccgccttttcaggtgaaaatctgccggattaaaacacccattacataatgcagaatcagaccttacataaccccaccggggcaaagctcggacccctcactgtaatgtcgagaaccctaaggttttgatgacgtgtgctaattaatctacgcgagggatccgaacagcggctctcacgatccgcattttcacatgccagaggccgtttcaaggtttgtttgctcgcttagcgataacagttcacgatacggagaggtcgacggtttgagttgtttgccaaggtgggactgccttcatctcatctcttcggagatcccccacgtctctcctctcatttgctcccatctccagtacagacttcgacttgagtactttgctgttccaaggatctggcttgtaataaccgagggatctttggcgacatagcttcggtgggataggtttggtgggatgtcttcggcacgataccctcattcggtaggatctcttcgctaggatctcttcgggggatgtgttcggtgagatatattgattccacggcgggattattcggtgtgatttcccgtcgtagcttgctcgcgaggtgacatagagcggctacgtcgaactcactgtagtcaaagagcggagtttcttctttctccatgttgtgagccaaaatgtttggggcagggagttgctctgcttaagacaacttggtaaatccctgagcagcgaaaaagtgacataatgggcaagtatcagatcccaagggcgtcgttcccagggaaggaacatcacatctacacacatgaccagtaccagtttggactatgagatatcgaagttgaattctccgtcatgccgtatgtttacttggggtatgaatagtgaaaatatagaagtttggttgttaaggtagtcggctgcggatggcagcagcggcattgtctgatcctccactcgttgagtaaggtgacattggcttatgcgccttcgcggacgaggggccctccttggcccagtctagaagatctgtatatcccacgatcctagtgttttgttcatcgtcgcccccgggaacgctgaccaacgatacgtactagttcaaacggccagtcgtctgttctgccatcttgttggtcgttggcctagtaccactggggatggggattttgcttctaagttccaggtattgaggtcaattgagctggctggctctggaaaatcggtgagagcttaagggtttcaacaaggtgagggtacttcgattcgtcaatcaagcgagagtaggtggctgggtcgagactgcctaaagcggagtttccagcgacttgtcgaaataggatgggggatagtccgttttgagttagtgagtctgatattcttctgggacgaggtgcgtggaagatcccgatcacacatggggggttggagccatttttataggcaaggtttcttggcttggtgatcctcgagcaaaagaggagagggctggaagttcggatgccagctcagagggtttcgaggtgctctgtattcctgagtgctaaacccgcgctcataacttgttgaaagagcttcttgggaatgttttcgtaattgtgattttctctaatcacatgatatacgcgtgattattttggcatgagaacgcgtcaaaaaattactaggccttgtggtcaacagcattgcagcccctacaatttactcttgacaaggccattacatcccatacaagcctaacaatattcttactagtatggtgaccccagtagtaaccggacgtttgcttgttctccactgaatatttctcattggaaaaacatgcgacctggtctacagaatgggaactgtttaaggagtaattcataagatatcaagctagtttgagaaagagacatttgaaattcaatcttcatatccgacaaaataagataaataaaacagaaaaggttgtatagtataaggaataaaagaacaagaaatcaatacctcgccagatatatttcaatgaagtgtgcataggaaaatattcattcttggctggttctgccttcagccatgtcaagaccccactcaaccttgaggtctgaagtaagtatacccgatttcttgagaatcatctcggcaagagccgggacagattcgctggtcaaaatctcaaggatctgcaaattagcttccaactcgcgggagatccagtttcggatctcgataccgaccagtgagtccaagccgtaaaccgtgataggcgcagcagggtcaaggtcttccatcggacgcataagaatgctagagatcttgttgagcacggcagccccaacaatggcctcggctccttcgcgggtcttcgattgccggataacaattgctggtgaaatctcggcaccgctctgtgcagactcggccaatgcatccccgccagcgagagtggagaggcgcaacaggtgcgacagcttggtatcgtttacccagaagggctgttcactggcaggtgtggatttgactgcttcaaacccagccacgcagtgaccctcgcatgaaatgtcgaactcgttgcggattgctgccgttacaagaccacggatatcagttgcatcaacggactctgtgcccaattgtttggagattgcctcgcgcttctgatcgtcggagagatatccgactccacgcacaatgggcaaatcgattgttgaacagcgcatcctggctgtctcagggtactgggcgagcgcagccatgaaggttccactggctgcgtatggtgattgacccatattgccaacaaaactagcggcggacgataggttgatgaagaaatccacggtaccattagttgttgccaatgcccgttgaacgttccagattccgtggactctgggcatcatcaccgtttggtagtccgcaaaactgagcttttcgaagagcgtatccttacgagaaagttagccgagatcttatctgttgtttgatgctgataaacttacccggagaaccatggcaccgtatacaacaccacgagcgggaggcatgcgagcgaggagcggaacaagatcttgctccacgctctgttggtccgccacatcgcagcgacagacttccacattaacaccctggcggataagattctgaacagcttgctcggccttttcagtcttaataccacttcgagaaaccaggataagattcttggctcccctctctggcatccagctggcaatgttgaggccaatcccaccggtcccaccaacgatgatatacgaagcgtccgcgcggaggaggttttcgtctcttctggcgggatagacctgtgtggtgagttagcgatcatttgctccaattgtcgtagatatcagcaaacataccttaaccatggaatcatccgtgacttggacgactatcttgccgatcacctgtccaccctgcagcgcacggaatccaatctcgacgtctgagataggaagagtggtgacagaccactttgattgggcgttagtgtcaacaaacagcttaaacgcatcacgaagcagccgcttcgtcaattgcggacgcttctctctgaccattcccaaatcgacagatgcgaaggagatgttcttgttaaagtgagacatctccaaccgagagtttgtcgtgatgtcccgcttgcccagttcaatgaaacgaccaaatggcgcgacacactcgaatgttgcttgcaaagcatcaccgctaagcgagttgagggcaacatccacaccctgaccaccagtggcgtgctgaataccctgcacaaatgacatgtcacgactgaagaagatatgatcctctttcagctggtaagtttccataaggaagtttttcttttcgaggctgccaacggttgcgaagatattagctccaatgctttgagcaatgattattgccgcttggccaactcctcctgcagcggcgtggatcaggacgctctcatctttgctcagtctccccaagtcaatgagagaatagaaggcagtacaaaacacagctggaatcgaagctgatgtctcgaatgacatgtcgtcaggaataagcaaggatccagaggccggacagcgagtgaaagttgacaatgaacctggtgacattgcacagactcgatctccgatcttgaagtcggacaccgcggctcccacttgagtcacgactccactacattcctgtccgagtctttcaccttgaagctggcccatggccatcaagacatctcgaaagttgagaccggtgctgtgaacctggatctcaatgtggtcttccggcagtgctccgttgcgggaaacatcatctgtgaagtaaagctcatcaagacccctcccgtctccggcagcaagtcgcaaagcccgatcttgtttgaaaggctgcatctggggaggggcatttggtgtctcttgctggacactgaggttcaatgtgttattgtcaaccaagcggggcacacaaacattgccatttcggacaacaaactcccagtcattctgggccagctgcgatttctgacaaaagactccgttaaataccttgagcatatgcttcactgcctcagcgtcgggcatgttctcccgctctcccaggtcaagcgtggcgaattggagcccagtctctgatctcacagtgcgagctaatccaattgccatgttcgcaccaagcgattccaaatcggatttgctgtgacgaacaacccacagtagaccccgagcccgactcagaagacgctgcaatgcgttgaatttgtcttgggtgagatgcgataggatcgagcgatccattcccccaaggaaaatacaccattttccggtaacatcaacctcatcagagttgacagccgtgatggggtcaaccccaatcatctccttgagaccagattcgagactgagcgacgaaaaagtgccgatcgagtcaacgccaagaatcacaacatcaccggcgtttgcgggaccggttattgggatattagcagtggatgtcatgagacaaccagattggaaagatgctccagggtactcctcgacacacaggtcaaccccggagaagtcattctccttcatcacattgctccatccttcgacggtgaggaggggtccgtctgtgcggaatttgtcattggccagccaccatccagggaggagtgcgaatgggaagtggcgtgccctggggacagtttcctcgatgagtataaccttgccaccaggcttcagaagtcctcggatgtttgccatcgtctggctgatgtcggtagtagcatgcagcacattgcaagcaactacaacatcatatgtgccattggtgaagccttggccagtgggatcagccgacacatctagtgtctggtatgtcatgagatgtctccagctctcgaactttgtcttggctttttcaaagaagccgggagagatgtcggtataagtgtagtgcccaaaccgaggcgttgaccctggttcgccgcccagactctgcaaaataggcatggtagcaccgcctgttccagcaccaatctcaatgatgttgagtgtagggttttgatgtgccatcttgtcaacgcagacagaggcattggcataggcctcgcgaagagcgtcaagatcgctgtagtatcttccgattccatcatcctccagaagtacactcaaggcgtctacctcgcccctgaggatttttggaagcaactctcccactttgaatgccagctcacttgctccatcaacggttcggctttgttcaaggacgtcaagtgataaggcatctttggtgcccgcctttcggcaagttttctgggcccaaagatagaattgccgatgatggggctcgaaggtagacaaatcatcttctgtcacagagttgaccatctgtgcaaggtagtactctgccacatattcgagttgctgcattcgctcaatgccttgggcaacatcagtctcggggcgagggagctgtcgataatcttcggcggagaggaaatcaaagcagggctcatattgcatcttgtagcaaatctgatccggcgaattgtccgttgagcctttgatatcattcgatatcggaaccaaagtaataccattgatatcaatgagcagattcgccgggttgctgggaacggtggcaaatatgcggtttgtctcagggttgctcgcggactcgtttcctgacccactaccatagagttggagtacagtaccagcacttatttcgtgggacaatgaaacggagatgtgcttcacatgcgatggcacaaaggtggtatgcggcccgggttcgccgtaaccacgaagcagccacatgacttgactacatagatcaagtgtaacaggatgcagaatgcagggggtctcatgcccatgtggcattgctgccttcgtgtctgggatgcgtaaggtagcgagtgcttggccatccctgctcacagaggcttcggttagcccttggaagagaggaccgtaattcacaccaccgttggcgatattctcgtagaggaaatcgatatgcacaggaatattacaggaacttcgcatattcaatgcttgttgagtgaagcgtgctgtcttctcgagctcttgtcgagacccgtcgacaggattgacatccttcgcttcttgcaccatgatgaaaccattgcagtgttggtcccatccgcgaccctcggtccatgagaaaaccttgaactcgtgccagccgaggactgatttgctgggggcttccgatcgggatggtttcaaggtgagaattgtctccaccgatgagttatccgggatagtcaggacacggttaatgaagatatcgcggatatcgatctttccgggagtgacatggtgcagctgtgcatgttgtgaaatagcctccatggccatggccaagaatccggtcattggatacacagtgcggtcatggactctgtgctcgcggatccaagggtgatcatctgcacgaatgatgttcctccacctaggttcaaagtcgacattctccatgcacaatgagccaaggatatcactccgagggaattggggatggaaatggttatcacctatccgtgagctaaaccagtatctttccgagtggttccacggatatttgggcagatttgtcaacaaagctggctttctcgtcgttgtcttcaagttcgggaagttgatagcttggaagtcgagattcagaccctgcgtgaacagcgagccagctaggttttggacagcttcgatgtcatctaccttgcgtttcaaggtatgaagatactggacgttggaatttggggcgtatttctgcgcaatgtctttgacaggtgtctgcagcgcagggtgagggccaatttcgaccaatgtggtgattggcgtatttgcctgctcatcggtgataaggctcttcagaccctccacaaactccacacgagagaccagattgtccacccagtaggaggcacccaaggtgcttcctgggaccaattttccatagacagtcgaatggaatgaaacctcagagtcccgaggcgcaatcttaccaagtaggcatctatattcgtgcgagacaatcttcatatgatgggagtggtaagcaacctcaacctgcaatctccgggtgaagatcccttctttgtccaaggcagtctgcagatcgtcgatgacctccgcgtctccagacaaagtcacgctggactcactgttcacacaggcaatgacagcctggttccctcgcatagcatccaaaatttgctggatgtctgaggcgctggctccaaccgctaacatacctcccttgatagacttgtcatttgctaccaagtttgccgcgacaccacgagagtacgccacacgaacacattcttcgaaattcagaatgccagccgcgtaagctgctgcaatctctccgctagaatggccgaccactgccttggggcgaataccccaggatgagagcaggtcaaccaacgctagctggaccgcagtacaagccggctggctcatgtatgcggcagaaatagagctcgcgctcgggtcggtcaaaagcaattcatctttgcattgcgaggttagtgtctgagtatatcgctttgggcagtgtcacaattgggttggagacatacctataattgagaacgtagcaccgaatgatttcaagcaagcgtcaacatcctgcatagtcttcttgaagaccgggtaggtgcccagaagttctttgcccataccgtgccattgcgcaccttgtccagtgaagacaaagccgacagtaggctctttggaagaacgaacaggcactgcgtcgttagatagagatgcattcagctcctgtccaaggattgcagagcatgccaacctccatggcaggaatgttcgtcgctgtcccagtgtataggccatattatccaaagtgctatctttgaaaacaaccgggaaaaggtcgaggtatgttccgattgatttcccaagctgaagagcagcctgtttatcgtacgcagagacaacatacaaccttcgcctgagaggatcgttgttcgctgcaaggtcaccttcgtgccggggtccacgctgtaggataacatgggcattggtcccgccgaagccgaagttgttcacacttgcgtatggtttgccacggggccaaggcatgagcttcttgggaacctggttggatgtttagctcgatccattgatacctcaagtcggtgcttgatcttaccttcatattccagtcttccatcggtatctcatcatttgccttctcaaaattgcagtttgggggtacgaagcctcgctcaagtgccaaggtagttttgatcacagaaacaacgccgctggttccttctgtatgaccaatgttcgattttacagacccaacaagcaacggttgacgcggagtgcgtcctttgccaaaaacggcattcaatgcagtggcttcgaggggatcaccaactttggttcccgtaccgtgagcctccacaaatcctaccaaggacgggtcaatgcgtgcctctttatagacttgacgaatcagttcttcctgtgccttgccatttggcattgcaatacctctggtccgtccatcctggttgagaccactgttgataattacagatcggatagcgtctccagcagcctccgcatcctcaagagacttcaatataatacatccagcaccttcacctcggccaaagccagtaccgcggtgatcaaatgcatatgaccgaccagtgtcggaaagtagtcttggggattaatcagcttttgtgggtcaaggagactgccagtgacacttacctagaacgtgtcattgagatgaaagtctcgggggttatattgaggtgacatcctcccacaatggccatggaacattcaccgttccggatactctgagaagccagatgcagagcagataagctggaagagcaagctgtgtcgaccgtaacactaggcccgttcaagtcaaaataatacgaaattcgattcgcctgcaatgccacggctgttccagtggcagcatacatagggatagccgtgatatctttggtgttgttgatttcgtagtctgggtatgaggcgcctgcgaagactcccactttttggccactgatctcgtgactcggaattccagcgttctcgagggcttcatacacacattcaagaaaaatacgctgttgcggatccattgatctcgcctcttggagtgtaatgttgaaaaatggcgcatcgaataggccaacgtcttctttcaggaagtgagctcctactgggttgaaggaacctggtcgatctggatcagggtgatagaaggactcggcgttgaatcggtttttcgggattagcgaccaagcactccgtcctcgagaacacaggtcccagaactcttcggccgtggaaacgtcgcctgggaggcggcaggacatgccgatgatggccattcgcttgggcacatcgcctgtggcattatcggcgatctcactaggtgcttcgtgcaaaaatgcattcgcgctctcggcaactggagttccagtcccggagggctgttgaaggcgcatctttgatagattcggtgtttggtttgaagatgtcgaattatgtacctggctgtgtcccaatgtccaacaagtgtccaaagagacaaatatggatttgcaagaaaagatatgtatagaatagtacaatcacagagcgttcgaaacaggcactcggtccatccaagtacttcctgaaaggcagagagtaaacaacaagggcgtcgagatggtttgtacaacatagagtgcgaaccgcccttgcataaacacccaagcgtgcgcgtgccgatctctgtccagtagtttcctgattgaaacaggggatttaaacactgaatcgggcaatgataggtcgagagaacgcttatgtctgtcttccttgatgacgaatctaacaactcgcagggacgtcaatgggatcatccatgcatgaaagtatcccctcgattcctcgttagaggtttccaggattgtagatcgagatcagtacatctgaccttgtccatgtatttgcaatggtctggatagtgttttctccgatgcccttgctaaggcgagggtgcgttctccgtacattccaaacacaggggcaaactcccgggaccctggcagattcctgatggcataatttgttattggtgcctcctcgcgtagcaagtatctttatagaaccctccgggtggtattccacctcgcttttttctccgaagatattccccagttgattatcgcgatgaagtttctatgtctcccaggtggctattgcagtgccaaggtatgtcaagcattttgtcacgtggaataaaatcatctgacgccgactatacaggctctcaaaacacagctaggtaagaagctgcatttgatgcgatgaacgtcggagagaactaatagtgggtacaggcccgttctgcgatgccctcgcggccaatggaaatgccagcttccactacacgcagggaaccaccgaggtgcatgttcccccagaatcagccgggtttttcggtccgccgcccaactataccttcattaaggttgatgagcctccactggtccatacgaacttgagtgacttcccgaaacgcgacaccccggaagaggcaatgaaagtcgccacaaaggcggctggcgatcccacattttcatgtatcgctgaggtcatggaccgtctggtcggcattcttgacagtgaaggcgacattgatggtgtgattggcttctctgagggcgccctaattgccgcatcgcttattctagaggagcaaagaagagagaaggaacttggtcgggcacctcgacttaaatgtgcgattatgttcagcggatggccaccggtacaccccgtgactggaaaagttctcacggctgacgactataatgaagagccaatcactattccgacttgccatgttgtcggtgcatcggatccgttccttgatgggtcaatggcactgtacaatatgtgcaatccagatactgcggacctgtttgatcatggggcaggacatacaattccaagaaagaagcagactgccgatgagattgctttagttgtacgcgagatgatcgactgtgtggcttgagttttcctttatatagcaacacaccagaaacaacatccgataggctagatttacgcgctatcccggacattgggtgcatttcatgttctcataaatatagaattctcgcactagtctactccagcagcggccttgtctctgcttcttccccctactcaaattcaatctgaccctctgttcgacaccattgaggaaagagaccaacaaaggacgcaagtcccagatcccaaactcaccccctagtgacctccgcccttcctcgtcagcctgtccatacttcgccgccttccaacgccatcgggtccggcgcacaagccacaattatccaacccctagaacgcccaacgccaacatcccgagcacagcaactattactgacagaacagtcaaggtactcgcatggcacccaaatggcagagctctcagctcccatatctccttagagccaagggggcagatgctttctgggccgacaggcgcaagtatcggacccgtgataggttaggaacacaggtcgaggactataccacaacaatcaatagtcagcagcatatgacatgtctgataaatcaaagcaaaagcaatcatgagatccgtggtaggtgaaatgtggccttgaaacccccattctgggggctggggacgcaagggagcaggatgtgaaacgaatacgaggggaaggttcgcatatcgactgcaagttaccgggaagggagaggaggggagaatcagactcgactacgagaaaaagctggtcataagagaatgcgacctactatacaatatggaaaagcggatctctggaatcagggttgtccaaggggaagctagagttttccaggccattcatcactgtttacttggttaaataccatgtaaggtggttgtggtatagctggttcctgtcctcaatagtcagatttcttcccttgcagacagagcactttgcccctggtgagttgcgggtgaatgtatagtgagataaaatatttgcgagaaatcccatgtgttttgtatagagcttattattttgcaacccaacatgagactatcaattggatcaaaagttgcgcagtcatgcatttttgggctgcggtacttttgccactgcatcctcagggcatctacaacgcacacacatacaagtcccacatgaagggtcatctgagtcactgtggtggtacagagtaatattatatagacttgatgatcgcatgacaccgtggcgtgaaaacgtgataaatttatcctggtgaatcgcgctgaaaacgaactggcgcagaaataccaaaagccacaattgtcgctcatcgatgcataacaaaagggaaaaggagatgttttcgctcaaggaaagagggtaaatcttgttcagaccacgcgcttgacctaaatatggagcattagtatatcatcttccggtgtctcaatcaaaggaacccacgtacctcgaagaatctcttgagccaccacacctggaacacaccctcgccaataaccaccataagttggaacatgctccaccacttcacgcggccgttcgtgctctctgcagtattgcggtgcactcgctcgcgcacgacgatgtacgactgctcatcctttacctgcgtcaaagcctcgctaagtttgcggactagatggtaccagatgatcagtcacaatatccttcatcttccgtcggctgttatttcccacgcttaccttcgacctcgaggggatcctgcgtcatctcatgttcgggcacgtagacaattccgtggacgttgaaggagacctccttggagttggaggtccagccctcgttgctgaagcagtagttgtatttcccgtccagctgtgcggtgaaggagtagtcgtcggaggcaacagcttgcttgaagtactggcggtttctcaggggatcctcgacctgcgacgaccgagcgttagcatctagcttattttgaatcgttcctctatcatgatttagcagctggcctagtccgtaggtaggcatagacctctcggtttatagatccgatatcccatgccagagccaccatcagagcagaagcggactccctagcaacaccgggataattcatacccagaaatcaacctcaatgttattgctccctccaaactcccgatctccaacctggaaagtgacagtcatgacatcgtcgcggtgcagtgactcgtggaagcattctcgtgagtgagacttgagctggatggtgtgtgcggtcgcggcggtgatccaccccatcgcggtgaccaggattgcgcttgttgaaaatctcatattggaatatttcggctccgatgagtctggggtgattgacgagtgcgtgggtggtgatgttggtgttggccgtcaacgtcaacgtcaacgcgcaaggtgtcaattggcggcgctcggaccacttcagtaaacaccgctccgccttgagattcagtcttggctgtatactggagttgggtggatttagattgtgatatgaataattatgttatggttagattcaatgggtctctcgaaggattggcgtctattcgaatgagaatctaacacttgtaaagttataccgcaacatatatatcgttacattgtacgtcaactacaaacagcgagagtctttgtagttatgtacaagcgtactgaacacttgcataagaagagtaacgtagcagtggtaaaaagtctgaattcattttgaaatagtaaacactcgaacagtgataagctacaagaaacacaacgggaaagcatgtatatcaacaagctacatccgacaatatcacaacaagggggggtacatgataatatagaacagtcaaaaaataatgaatgacagagattgactattaatatgtatagaaggcatgtaaacgataggacatgaaaaagaaatgtaagtaggatattcaatgtacaagttctttggggagatgagaggtaagaggcaagcggaataacggggtggtatcaaatccgagaacgcaaacattgatcaacggccatgaagccggaagatatgtatgtatgtcgaaagggggaatatggatataacgagaggagagaaacccgaccaaacgcagagatagcaaagatatcacagattgaggattcgtcctgtgggaatttttctgccgatagaaaaaaaaaaaaaaaaccaaattaaacaccgagcggagatggagttcagaaaaatctataggtaagatcaagggcagcagaatcactcttcctcagtggagggttcatcagaagaggaaacgtcagcgtcggcgtcagcttcgttttgaatgatatagctttcttcggcttcagcctcatcaatcgtaggcccaaaaggactctcattatccctctcccttggcgaagccgagaccatcccatcaacggtactctcgttctcatccgcgaagctcccatcctcgtagttcgccggctcggcatcatggtcataactcgagcgacggagaagaggcggcgtctgaggcggctccatggcaggtacctgactgcgaaccgcgccacgttttggggctgagttgaagcttctcaaggggcgagtttgcgcaaaccgtgcggcagcactagtctgcgagccagtaccgttcccgcgggcgtgggagctcgggggtgttagtaggcctgacaggaaagtactcgcgttgctgggctttgacggggtctgattggaggcgttggcggcggattcgcggccttttcgccaatttccccaagcggcagctgcagctagggggagggagcggggtgaggcggcaaggtcggcgagggacgggaggttgccggatgctagccgttctttttcttgctgctgcatttggagattggccttaagacggatggctgcgtcgcggacggcttgctgattgaatgcgggcttggacacagtgtcgattatgtcttgcaggtcgtcaatgcggacgcctaggagctcacgcagccaggtgatctcggtgtctttctccttgatcttatttggcgcatctttatctatcgcggagacttcctgttcaagctcctcgatacgtgtctcgcgctgctggagctggtcctgaaggacgaagattgactcgcgcagggcttgaggggagatccgttcgggttcttcagatcccttgttgtatgacatggacggcgtcgcccgcgagtgcgaggttgcggcagctgcgaccgagctgggttttgccttggcgctgtgggctgcctcagcagcagcacgggcagcagcttgagcgatctcaaccttctcttcgaggagatttacgcgctcttggagatgcttagccttgtcctcggacaaagccatccgctccatgttatggctttccccgcgtgcacgatcctctgaagagttatgcaaagcgcgagcgtgacgttcgcggaggtcattgagaatgcgctcatgcatcttgcgggtctcatcgatggcaagatccttagctgccagggcggtggcctttgagtccctggcttcctcgaggagaagctcgtagcgctcgcgagaggtatcggtatccatgcggttgttatcaagttgggtctccagacgaataatctgagcctccagctcggcacgcacaatgttgacctggctgttagcagcttcgaggtctgcctccatcgaggagcgagtgcgctggatctcgacgcggctgctctcacgggcttcgacaaactctcgctcgaaccgggcagccttgatctgcagttcatggttctccgcccggaggctagtgaccaactcctccagtctagccttgtcttgctgagattgctcatggacgaaccttaactttgtggcctcccgttctttcttttcgaattcgtagacatcctcctcaagcttctcacgcaatttgagctcgcgggagtgtgacgcgcgcagctcattatacctggcagtgtggtcttcctcccttctgcgccagacagcttgatcgcgagtaatttcagcagtgacactgatcatgtcatcttggagacgatcgaacttttcagtgaggttctggcgcgagatcatgctatcctcaatgcgagttcgcaggtggtcaacggtctcatgaagagacttgttctcacctctggtagtttctaattgacgacggaagctatcgctagagagacggtactcgtcgagggtaccctcaagcgcgatgttcttcgtagacaactcggcgatagtaaccttgagagtctcgctctcttccataagagactcagtgcggaactgcatcttctcaaagtaggggatcttctcttccttgaactggagcagacgagactcggcatcctctgcagcagcactgtgacgagcagcatcttccctagcaagcttcaatagtcgctggacctcagtcatagcatcctgcgcgtcacggcgatccttgtactcctgctcggcacgctcatcggcaactcgcaacatacccttaaggccctcgatctggagcatcaggctgtcggcaccaatctcctcggcctctgacaggcgcgggctcgggggtttctgcaaggcgatctgctgagccaattgcttggccatggcttcctcgagaatctcgcgcatatcaccaacagggtcctgagcgagcttcttgatcgtgagagcctgcagttcagcaatgctttctttcagctgcgacatctcgtgatggctagagtgtggggaaatgcgttgagggatgtcatgggtaatcaaagcttccataacgacattcttgagcatttccagcttacgttccctcgtattgtggggcgagcgatcgcgaaccgaagcttcctgaccatcatcgtcctcatcatcagcatcactgtcttccatctcagcggatgtgctgcggaagaccattctgcttgcagtgccactggcaatagaagccaccgactgctgaatgacagccaaggcacgttccacagggcccaaacgatcatcgatcgcagagccaacaagatcgttgatacggcgatcgaagaagcggttacggttcatgaacttctcgtcctcaccggccgatatcatgtcgtcccagtcactgacatggtcattttcagtaaagagctggcgaacaggagactgcagacgagagataaggctcttctgcggagagaaggtagcattgctgttggcatccatgtccgagccatgtttgggaacggtgagtttgtaggtcttggggactccaccagggctcggactgggtgcttcgctgcgggcatccgcagagccaaaccgcttttccttcgtgggaccgcccatcgactctgtgaggtgatcgtgtcgcggctggaagggggtcgcgtggatcgtttggtaaggagtcgcgtggcgctcgatgccaacatcggcgtcgtcatcgtttagctgttccataattgcattcagctcctcgtcgtcaggcgagtcgttctcggagtcccaatgactgtcgtagtgcttatgcttgcgggtgatgaagtctggttccacatgggttggggcgttggactcaggtttagcatgatgatctgacgtggttgtattcttagatgggccagtgacagcgaatcgagaatccatgagtccagcttgcttgtgtttcatttcaacaggactcgagagagtgttttcgatgggctgctccttgacgatatttgctgcaacgggttttgtttcagcaaagctggaaggctgcacagtcgtgggaacaaatttagaaacagcaggcttgaactcgaaaggctgggcactagccgatagcatagtggtcttggtcgagctcttagatccatgaagagcatggtcgacatccttcgagacagtgacagacctatcatctcctgctgcaggctcccttggttcacgttcttcgataacaatgtccttagaggtccgcgcccggatcggcgatccgggttgagacccgttctcggcctcacgtttcgcatcgaacaaagtccaagtatcagcttcactgacaggggtacccgtccggtctaccagattattctctttgggaatggcattctccttgccgtcagcgacgacatgcagcgcactcgaagcttgagcattgcccgcctcgcccagaggttgggtcgagctactatatgtagcctcgccctcagcgttgccgacaccgcgacacgcacgcttgtggcggtcggtcggtacaggtcgaccattggtgtcgtcttcaacggcctgctttttgtcattggtctcctgttcgatttcatcaggtcgcacaataggaatagctttagacttcttctcgggcgtggtaatcttgctggtgtcaatgtcgccgaagattttggtgcgactagccggaggctgctcggagctggcattcgagttgaggccaatagaggagttggggttgaaaacaggtgcgtcaacattgaacgatgcggcagagaatttgaatccgccactactactggcattgtggttcagcttagaactcattggtccattcacattcacagtgctaccaggcacgaacgagggaggcggggcaaaaccaagtccttggcttctgccgaactggaatgggtcatttccgaacggcacaggctggggattgaatgatgcattagggttgaatgccttggcctcaacgttgagtgatgaactcgagagctgcgactgatggcccccgtggtaggagtggccgctggcctgtgtctcgtgccacggtccttggcgagtctgtggcgtacccgcgacgctgggatttgtgtcgaggtcagacccatcatgaccattctgttggtattggtctccgtagatttgctgaggaagctggtgctgggcgaagggatgaggcgggagtgggtggttttcgttttctggcaatccccagcccgacttcagtatgccggcattcagccctgcatggccgttgacatcacggtaatcatcctctaattgccggtcgatcgagtcttccaaatgataatcggtatgtgtcatctggtccagccctctttgcagagtctcgctcagattatgaccgtgacctcgaggtgtaggctgggcaatttcgacactcgatgcgtggaaattatctgggtgtccattgaccggggtcttaggagcctggtatggcaggccttcctggtgcataccatggccaaattgagcatcgaacacacccttatcgttaaatgccgggtagaaagacccttggtcatgtagcggagacactggtgatagcatggaggaaaagttgcccatggcccctggcccagccgaagaagttggctgccgggggtttatgaagccttgaggagtcatagctccctgagcaggaggcgtgggctgaaattggaatgggaatccacccatcatattttgatccgcacccatgaatggcgtctgcataccgaattgcgaaggtgatgccatggttcccataccaccaggcgtaggcattgatgattgattgaaatgaggcgagaatgggtgaatatggccgaggggattgcttgctgcggacgcagtaggaatcggcggggatgtaacaaggcctgggaaaggcgtgccgctagggtttaacgagtaatccggtgaaatggattgtgcaggttcatcatcgccgaatgacactcccagggcgcgtagcttttcttcttggagctcggtgatataagcctcccacttggccctgtctgggaagttgacgacaagtggctggctcttggatatttcatggaggtcatatgggtcgggatataagggtcggctgagacctcctagagtcgtcattgtggaggggtcctcggaatcgccaatggtgaatccacgaacatcgtatccttcgtcctcccattcttgcattcgctgctgaacgtcggccggtgttaggagacgatacccaggttccgagcctctcctatcgtcatttggcagctcgattatgcaggctttcccacgccaattcagcttctttctccgtcgtggtgtcggggtggctgccctgctgatatcagggacatgtatttttaatggacccgggttgaacgggtcttccatctgtgcagcgtcctccatcgcatctgcaggcggaggaggtaacggcttgtctatcggcgagtttacctcgacggtaggtgtgtttgaatttgacatgttgtcttgcggtggatctttatcgtaagcgaaaccccaaaaatcctcctgccgcaaggtatcagcgcgtttatgctgacctttgttgccttttgcacgcgcagcggccttcttcccgacgaaatcagagagcgttggagttttcaatagatcgtcggaacgaaagtcgtcctccaaaccaagccaatcgtccgaagcgtcgtcagcgaagtggtttctcgcagtgataaacgatggcgcttcacttccagagtcgtcgctaagccaattgctccgctccgttctaggctgaccagtaaggtactggttgatccaatcttgcgtgaagtcccgaatcgatttatctccgatattggcgacgagatcgcggtccacgggtacaagtatgtcgtcgttcgcgatactcgatctccgcagctccgtgtggttggctactgacgagacgggcgagctgggaccagatccgttgtcgatctcggagagttcgagttggctattggtcactgacagtctccgagtgctaggtgctgcatatggggatccccacgcggtggtgtagtagatgctgctttccgccttgcgattatccggcgaagaggacccagatccttcggttgcgcgatatgaggataggaatgggagaggcgggggttcaagggtgatgctccgcggagaggttcgttgaccgggggaaccaacggtcgacggactcgagtcttccgatggcggagacgacaagagtagtgagggagccagacgcgattcacggatgaggcgcgtgtctcgcgactgaaactgtggagaaggcgccgagaaggcggaaaatacggagtgatctagatctgtggacattgaggtggttagactagcatatttggagggatctagagtgattgaatcaagggagttgaagaataaagtccacgtcacggtgtagcgcgaaatagggagaccaatttcacagtcccaagaagggttcaaagagagataatatcaatgcgtatacacaccttccgtgtcgactcctgcagcaagcacttgcttgccgctccgcttatcgtccagaatgttgacgcatggaaatcaaaccggaattgaagaccaccgctggcaagacaacctggggccagataatgtacaggttgtctttttctggtttcgggataggcacactttgcaagtgaatgaaagtaatggagagatcagaagcacggtcaagtctgaagtatcgaagaccaggatggggaactaaggggaaaaaaaggttggacgtcacgggtattggatcttcgtactccgtactgggtacctcctagagtgtggatagcccgagctaatgcggtgtacaggtacgataggcccattcaacgctcactagtattatttgtttagcgcagaccgaggccgttggtttagctgtgttggcttggctttcccgacaaagtcaattgctatatctacgcatagcacatgtacccttaccttttagatccagaattaaggattgactgtaagttgaatgctcatggccactactgtgcttctgctttcgaagtagagtaaacaatgaaaactggagttcccagagattcaggggtagaagaaaagctttccatggatttgactgtaccgtaccactcccgggcgccgtccacggaccctattcgcagcatgactaatggtttgtcttgtcacgagccaatcagcgtctatcgtacaacaaaatggttctaaggagcgtatcttcatgctgattggtgagattttgtccacgggagtcgggtaatatctgttgccgccccgagactagtctaaaggactcgatgttgaactggacgcggagttcttttttatcttacccgcgctcttctccgaaagtgtcagatgctgataatacaagtacatattttgtattgtaactgctaattgaactcagcacgacgctgcagcaatgcccatgttattatttacttatacaatcaaagcagttaagccatgtagccatatttccattggagtaggagataagcaaccccagaataaatcagtacaatccgaagaataaaccgctagtcgcgggcaaggtatcaaagcaaagacacccggatgaagcgaacaaatagtcacaagtcgtctagttggggcaggaggtgtcaaacttgaccttgcggtccgcggtgaacagaccccagtgcttctcatccttcatctcgccattgtcgcccttggtatcgggcttccaggactcgtcgaaggcctcaaagtagaacaggtcaacaccccagtcgagcatgccacagataccagtcttccagaaggtctgagcattcttggtaccggccttggcagcctcatagtcagagccgccatcggtgggccagccggtctcaccggtaacaatgttgatcttgtcggcgttgtcgccggcgatcttctggatgtgctccatggcgccggccatgtcatcgaagtaggtctggtaggccttgtcggcggcagtaccctgccagtaagcaaaggcgttggccaagctacagagagagtcagtattagtgcgcagagttgccgatttcttctacatttccacttacacatatgtcacaacgggctcctgggtgaacagggcgtcgccagtgccgtcagcaagcttgttccagctctcggcggtgccgacaaggacacccttgggcacattatccataacgtggctgatgtaagtgtggagctggggtccagtcaagtcaccacggtagagagtctcggacccgacggtgatcgcatggatgacatcctcgtaaccgggaatggccttctggatagcggcccaatctcccttgaaggagggctcctccaaaagattattggtatcggtaggcttgcccaccctaaagaagtaaaaggtctgttataagaatagttccgattagggggcgagaggaataacaaaaaacttaccacatgcccagaacgaccttgaagcccttgtttttggcagcaggcaggatgttttgaggggtgttgcactcagtgccggagtaagtacggacgagagtagacaggctcttcagggcatcgaaatccgcctcatagtcgctggtagacttgcaggtaccgtcggcgttcttgtcaccgagggagaaaccgagagtgcccttagcagagaccagggccggggccgcggccaacaggagggaaacaacaccagatgcacgcattgtgaaagatgaggtcgatgaaagagggtattcgaccaaagagtgacgaaaacgaaagttgaaaagaatgtaaaaagttataaaatcaaacgaaggtacgtcagggaccaagaagaaagacccagaggattggagattgggggggaaatgagggtttagacctttagaccctgacgggtctggggctttgcctaatgtggaggaaggtccccactaattgtgtatagggggtgagaattgagccaatcaggaggaaggaaactattcttggatccatggatgaaacagttcccctttaaagggtccggatatgttttggtgatgtatgactgtgactttgtcggcctaactacggagtataccattcctatacccaaccctctcctatatttctgctcctcggatcatatttccatctcacatctcagcaagaccttgtatctaagagctaagtctgatatctttcatattttacatgcagctgcagagtcgtgatatcaccttgacaaagcccagatgccaaccaaggtagaagcccagaatctggaaagtcccatgtggagagaaccgatcggatggcaaagaatcacattgtgttgtcacaccgcccctatcctattactcgaagagaaccacagtgacatgtctttggaaccggatttcctatggttcactagaatctggccaggtcgacctccctacacaacactctttatcgcctctatggccgggagtaagccatcctgaaccatatcgagattacaacgtcactaagaagttggtagagactcgaatgagccgagtctctattgttacacagctgtatcaaaaatatatctaacattctttgctgtataacaacctgcagacattcaagcgtacaatgactattctcatagaaggacacgcgcaaaaggtatgcatatacggagtaacatacggagtagttagacgtaccttacctcaaaaactcattaccaccatcgatattcaactcagagacctattcctttccccagaacgctctgatattcctctcaattcctagaacccaaatccaacagccggcatttcccgagccagtattgacagcgttagagaaagtcgcacgagcggaaatagtattcgaaagtgtggatatgtggcgaacgaatggggtacgtagagccaacgtacaggatgctgctgcaaggagtcaatgggggcggatttcgtattgtgtattatttgggactgagcatctggaaatggtggaaacatcaaatatgtaggcttttgttgtacactgggttagttgagattgggattgagttgtatacgggatactgcgtactgagccacgagatatgtcagtgggggcttgtcagaatgttagatgcatggcagtgctctgtggcttgtgaatccagggttagcttagtacatatgcaaatgtaacaaacattctattgtgtggcgcagtcccctgggagagggtatataagggtcccctccccccggatcttcaccttcttttctttcttcttcatacttaccttgtttgggtgactgtgatcaaaaagacagttcaccacaggctggtccctgcattgcacatcgcggcggaacagtctgttcaatggcactcgtgtcattgacaggcgcattctttggcacctccatttatggaatattttcttttcatcaatccttgagccagtggcacgaggttggagaagaggatactgtaattgatgtatcgtagtcgcgtatttgtgttggtatacaactgacgctaagtccttagcctatctaccattgtctttctcgtgaaatattcaaatttgtccccattcccagtccacaaccccagtccgcaatccaagtccccaatccaagtccccaatcccaatccccattcccaatccccatgttgttgaccccgttgaggactctagaccctgagattacctcttcccaacacgtcatgtggtgctacgttttttttctcttttttttttacatcgagctgacattcattgtaagttttcagctattgttaacaagctctatcatacaaagtgtttctgacatgattcatagagggtatgataatatccgacgatgatcgccggtctagacaatgacaaaacgccttattgtttttaatctccaacatgatactatgtgatcctaaaagttgttccaaatccccccaaaacgccagccagctcatattacaacgcgagatttttctccttcagatagagctccttgagagtgctcagctgagtcacagccattgtctctcgcccgagcttacggggcagatcgactataatatagtgcatgagggctagtccatactgtccgaagaagcctagaatcctctcgcctgatgatcgaaggagtgctgccaggagagcaacctgggtttcctgtaactctggaggtggaattgccaaaatcttgtggatagtggcccagaacatcgtgttagggaaggggttccggcgtggagacttcgcgaaatttcgaagcgtcatggcagcatatcccgcacccagagcggtcatgcggtccatgtgaatttgttcactaacccatgaaccagtgtctggtgaacgccaccaacccaggacacggcgtccgccctcggtcttgtcgttgcctgtaaatccccacagggctgggcagatgacacggtatttggcccacatgatgtcggacatgtggagccctttatacgtgaatatatcgaacgagaatatctgagcagcaatgatgccgatcggctcagcgtgggattgcttgatagaggcttcggctagaagagaggatatcaagctctttgcgaggatgttcaatccgtagattagcattgccggtactttgttctcggacttggcaatctcctcaggtgggaatgcgaagaaattccggatatccactgttggctccgggtaggcgagagctttttcaagctcagtcttgagctgaataatctgcgtttcgttcaaataatcaatacccaaacaaccattcggcgagtgtggggggattcgtacctgctgcttatttgcaccggttccagctcgaagctgaccgacagatttcttgatcgagcgtcgtaagttgcccatagtcgccttaaggttagattggctttggcccatgtccttcagccattttcgcatgtccttgagagtcttatgcagctcaacgtaacgtttctgcactcggatatcttcagccgaaaggttcccaccaccgattttctgctgctgttgactgtaggcctttaggtcggcctgttcctgcacctttcgggcgtcctcatcttgcttgagcttctgtgcgtcggcctcttctcgttccttgcggagtttttcctcgttcgcggctttgcgtgcggtttcaagggcagcggctttcttatccgcctcctcctgtgccttcttctcggcctgctctttggcttggcgttcggcctcgacgcgcgcggccgcttctcgttcgcggcgtgctttttcagtcttctcacgttcgatgcgctcttgttccttccggatcgcttcttccttctgcagacgctcttcctcttcggcgaggaggtgatccttcaaggttgtctccgcttcctcgcggacgcggtcgtggaaggcggcggcctggtcgagggcagctgtatggactgcttcacgctcgcggtcgatccggtcgagattttcataaaacgttttgcgctcatactcgtggactttcttcagatcggcgtcaaagattttgacttgctcaagatcgcggacgaggtccagcataagctgcttggacgggctgtccagtggtgggacatgattccgaaatcgcgtcattgtaggggtcgacatttgagtaaatgatttatttatgtgttccaaaaattcctggtggaaggagtggtgaatgttttgcggagaggttatgaaggttcggaggagtagcgacgggaacgtgtgatcaagtgaatatggaggtttcaagtgactgggatcatatccgtagctcgaagagtagagttcagaagtgccgagaatagaacaatatctcaaaatatcccaagctggtatcaatctgaatttgaaggtagagagggaacggcacagcgtgagagcaattggacgaggggttctgaggaaatgcgacgaaggacgaaagtaaattgcgcgtgtagcgaaatattcgacgttgtcgcgtcaaaactagtagaaaggagggtccatggagatcggagctatgtgaaggttgggattagcatgtaccattcgaggggccacaaacaaaatcaagcgtttggctgcattgcataaccatccaataataagcgactcgacgattcaacgtacatcgatgcacctgcttcaatatttcctcaaccgtttagagccttatgaagccaaaggaaataaattacctgtaaagttcaatcttacctccaaggttctactttcaccgctttctatcaccgccttgctatatcggtactttcggaatatcaggctattaaacaggcttgccctagtagttaggaagattaagatacataactacgaagtacagcaaaaagtgatatcaatctgatttgaatctcaattactcacatcaatcaacctatctcctactatttactgccagtctattttgcagccaaagagggccttctagacccccaagacaaatgagtacataagcaagacccgcgagccggttcggttccctggcgcgctcccgcctggaaacgttgacgtttacatcatcgtgagcatcatccattttgacctacactatataattgggagaagggaatacgaggtgttccatgtttctccgatgatatgtaccggacttgagcttgctaccctttctttgggctatgctgaataattagctcagcggatactgttcccatacccttaaaaagaccctagactagccaactcaccactagctgtctatatttgaatccatgtacggattcctagggaagagtccatgtttccgatttgcagactagacacccctatttacttataggctcccattaccatactagatactctaagtaggtcctcaaagcatttcaacggatgcatcaggatgatgataactggtagcaatgatcatccacggctgatgaagcggagtatgacggataactgttagggtatttacacgatccacttcggggttattgcgctaaacgctgtaataaaacgtggtttggtcatttccgaacacgccttctgctttccgtaccaatggccctctccccacacctctttgtatctccagcatcacctttcctcttctcctttcccccccctcctctctcttcttatcccatccctctcttcttccccccatatcactccttcgagtcgaattagtcgatggtttcatcgtctattctatccttccctataatttcagtacttactgtcattctcttcgaggatcagctctgaattcccgttttagaactttggaatcatcccggagacaagctcgttctaacggctttcttcgcttaaggccaacctcaatcctccgtcgaggtgctttttgtctgaattccctttttgtcggttgcagtcgtgctttccagcacagctccatcccctcggtccttccaactcctgttcgaagcttcatcccgttgctaccgtgttgctcgatccaagtttgccctgaacgtgcaattgcctcgactcctacttaacatcatccggttgcccctcgtcgcctcttggacttgtaaagaagaaaaaaacgatcatcccacattgagctctacagacgtcattttggaatgctagggttcggaggtcgtcattagtttcatcttgcaggtaagaagaatcgggatatactccacgcatttactttggaagtttcacccggcgtcgattgcccttgccgctttttcattgttagttgtgaggtcatcgtcgagtccgcttctttcccccctgagatggaagcttccattgggtccgcccttacctcgggacttgtactgttgatattcgctctgacattgccttgtccccctcttcttgctttctctcgttgcttctgtcatcttgcacccttactgatccgctctttgttactcttccaggataattcacgtattgaaaccaacaatccgcacatacaaacttcttttggtcggcccgtgatccatctcacttggctcatttgccttttggcgcagtaccagtctctcctgtcgccggattcaccccgcccaatacacacattacattctacagtaattgccagcttctgtcatttgggatcatggatcaacagagtcaatctgggcctcaaggccccggtggccgcaagttccatattgctcatcggagaagtccatctgagctcaccccgttgatgagtatgtgaccgctctcgtgaccgcttactatataaccattcgtcccatcatatcagctaacttgagcttgtctacagtggaacaactggccatccaacaacagatcgagttgctccagcagcagcagcaacaaattgctgcgacacatcaacaatacgttaacatggggctgttgcagccccagcaactaggccaggtgccctcgtttcaacccggtgcctccatgggcggtgtctccccacagcaagtgaatgcattccaattcccacaggggggacagcagcagcagcttggagtaccaatgaacgtaccgaaccagcattcgcaccgtcgcaaccagtctgctctccctggtcttcccatgggcccacctcctgccccgtcttccggagcgtcgggatacgccgattataaccagcagggccaaaacaacaataaccacaagaatgagaacgccggtcgcggtcgtggaggccctcccggcggtggtcaccagcgccgccactcgcttgctcttcctgaggccaagaaagccgccgagctggcccagcagaagagaacagcttcgggattccagttcccagctcctgctcctggtgcaggtagttctgataaccagtcttcatcggatgacaagcctgtatccacttccccggccccccagggacccgccttccagcgggccggaaatatgcgagctggtggccatggccgcagccaatcgatggccatcggtggtaaccgggctgccatttccggtcgcggtgcaggcgggttccaattcccccaggccagtgagccagtaaccaatcaatctgataatcaacgacgacccagccagaacggcggccatgcccggtcatcctcgcgaaacttcgagggtaactggcgccagcccaacaaccaaaatcagagccaggatcagcagagacccatcggtcagcagcagggtggattccagcccggtcaccgctcgcgcggctcgatgaaccagtccatgggctctattggtcaattccagtatggcggccagccccagcttggccagcctcagcttatccaacttcctcagggccaagtcatgatggcacctcagatgttcggtaatcagcaactgaaccccctccagctggctcagctccaagcgcttcagcagaacgcccaaagtatgggtggtctccaggcgagccagcatgccccgccgcagatgtctgttcaacagcagcagcaacagcagcggaagactcttttcactccttacctcccccaggcaaacctgcctgcactccttagcaatggacaattggtcgctggtgttttgcgcgtcaacaaaaagaatcgttccgacgcttatgtgaccaccgacgatctggatgccgacatcttcatttgcggtagcaaagatcggaaccgcgcccttgagggtgactatgtcgcaatcgagcttctcgatgtcgacgaggtgtggggtcagaagaaagaaaaggaagaaaagaagaagcgcaaggatatcaccgacgcccggtctaacagtactgctggaaatgataagcttggtcgctctgattctgccggcgatagacaggaaattggcccggatggaagcatccgtcgccgtggtagtcttcgccagcgtccgacccagaagaagaatgacgatgtcgaggtcgagggtcagagccttcttctttgtgaggaggacgagatcagcgacgagcagaagcctttgtacgccggtcatgttgttgcggtcattgagcgtgttgcgggccagatgttctcaggaaccctaggtctcttgcgtcccagcagccaggctacaaaggagaagcaggaggccgagcggcaagccagagatggcgctcatggccgttcccacaatgatcgtcaccaggataagccaaagattgtctggtttaagcctactgacaagcgtgttccacttattgccatccccacagagcaagcacctcgggacttcgttgagaagcaccaggattacgccaaccgaatctttgttgcttctatcaagaggtggcctattacctctctgcaccccttcggtactctcgttgagcagcttggggagatgggtgacttgcgggttgagacagatgccctgctccgcgacaacaacttcggttcggatgatttctccgatgctgtgctgaagagcatcggctgggaggactggtccgtctctagcgagggagacgcccttgcttcgcgacgtgacttccgtgaagagaccatctttacgattgaccccgccgacagcaagtccctcgaggatgcgttccatgtgaagagccttgccgatggcaaggtcgagatcggtgttcacgtggccgatattgctcacttcgtcaagggtaattccctagtagaccgtgaggccaagaagcgtgggactgcagtctatctagtcgatcggatcatgaacatgctgcctacccgtgtttccactgagctttgttccctcgtccctggcgaagatcgcctcacggtcagtgtggtcttcaaggccaaccccaccactggtgtggtggatgaggatgtctggatcggcaagggtgtcatcaagagtgctggccgtcttgactacgaccaagtcaatgcacttgttcaggacaagtctgatgtcaacaccagtggcatctctgccgacagcatccgcttgttgcatgtaagttttttctgattctaccattcttcttattttcccccatgctaatagtaacactcagaacattgtcgccaagttccgcgaagcccgcttcggtaaccgcgtatcaaacgttcctgtacagcgtctgcttcagcagctcgatgacgagaatgtgccagtcgaatacaatattttcgagtcaactccagcacacgaacttgttgaggagctgagccaccaggccaacttctttgttgctcgtaagcttgtcagcgctatgccggagagagctttcttgcgtcgtcagttctcgcccaactctcgtcgccttactttgtttgttgagcggatgaatcgccttggcttcgaaatggattcaagcagcagtggcagcctccagagctctctctgcaaggtcgaagatgtggatcttcgaaaggtaagcacattttctgttctcccagtcataaatacatattaacacgtgatacagggtatggagactctcattgccaaggccatgcagcgtgccaagtactatgtcagcaatggtgctcccgatgagatgcgccagcactacatgctcaatgtaccggtttacacccacttcaccaacccctctcggcgctacgccgatatccttgtgcatcgtcaactcgaggctgtgctctccgggggtgccgtggagttcaatgacgatattgagtcactgaacaagactgcggatctttgcaacaacaagaaggactcggctctcaatgcccaagagcagagtgtgcacattgaggcgtgccgtaaaatggaccgcaaaagtcgggagattggcggtgatcttatcagcgagggcattgtactctgcgtctacgagtctgccttcgacgtccttattccggaatatggcttcgaaaagcgtgtgcactgcgaccagctgccgctcaagaaggctgaataccgcaaggacagtcgcgtactcgagctgtactgggagaagggtgttccctcgtccgcatatattcccgaggacgagcgtcccaagcccggcaactcccgcgctgctcaagccgcagcggctgcccgcgatgctgaagccgctagagagcgggccagagagcgtgatgaggccatgcgtaagcaaactgagaccggcacaatgtctgcggacgacgtcgatgcccttttcgatgacgacgaagatgcggatgaggtgactgaaatgacagccggtgtgtcgctcaactctgccgatcgctcgactcagagcatgccgccatcgcctacacgtaacggccaccaccagcaggcacctcaccgtactcgctcggatcccaagattgcctccggaactggtgatgcacccgagaacaaattgaccaacaaagagaagtacttgaacctgttcaagctgcgcgaggtggatggagagttcatccaggatgtcacagagatgacccgtgttcccatcatcttgaagactgacctgagcaagagtcctccgtaagtgttcccattcagcttttttctttttctagcatgggcgtccctaactaacttatttctattccagatgcctcactgttcgatctgtcaacccctacgccctgtagaggtctgaacgcggctcttttttcttcatgggatatatttcttgcatgccaccctgcagattcttcgctcaagcgaaggatgctgtgtttcgtgcacgcctacggacataatccaatcccgacgcggatcgaacatatcattatcggcatatctttccttggtcttttctcggcggtttcatccaattatcccaaattctacccatcatctttctgacgtgtcctgggattcttataattatcctgttatatgtgcaaagcggttgtttgtctttttttgagcattttagttgagactgggcaaatccgttagtgccagaccttgcctggttttctttgttctcgttctctgagaatgtttaggaacttagcaggaaggacatcacagctcgatagtctcggaaaacctttccattaatctatggtattacaaactcataaccatcatcctgggctcttcttctgcgtacaatttagtctttgttataaagttgcctatgacttccaaggttgatttgcggtaagcctactgatatggtgatgaaaatatcgaaaagattgatccatggatgtcatgtgaattattgaacaaactcctaaacaaaaaaatcagacgaatatgttgtccaagccaaggcaaattgtaaagcccagggccaccttgcccagcctgatattgccaatgcaatgtaatggaaccagctccataaagttcttctcgctccttgctccatgcagtttgtaagtccgattgaattcagaccatcaagggtatcaagaaatgtcgctaacggggtaggtagatagagggagaacaaaaataaagaatcaactcaaaacaaatccaaagtagagttatcgagatgaatcggaggtctcaaagcaacgcaagaagaatccaccaatgtcaaatcaagttccagttcaggaaaatggatggatttcttatagccgacggataccaatgcgcggctttgttctgacggcaaggcgcctgtgtgtgccgctcgtggcttttttcttggagattccagaagaggaggaccctgagagagatgacgacgatgatgatagtgacggcgtaggtagttgggcatgtgctagagaaaggggagtagagccattgggcgtcttcatggggtgatattcacgcttctctttcagcccacgcgcagttgcagatccacggttttcttttccatccccgctcagcctgcgtagagggtctggcatggccaattggggcaaatcttcgaatattggcacctcatcgcggagacggccggaggcgttgactcccccacagagcatggagagcttgggtgttttccggagtggtgatgaagtacgggaacgtgtgtttgcagtgatgtttcgttcgttggagctcatggcgggggcatcgttgtcgttgtccgagtctatgagcatcatgtctgcatcggagtcttccgggtagggaattgagaggacggagagggggcgttttcccagagcggttttacggggacttgggggcgcaaagtagacaggcgaaggggaaagagttgggttgttttctttgcttgcggtagcggggtcgtcgctgtcgctgtcgctcgtggcgttgtctgttatgggtggtgagggttgggcaaaaggatttgaggaggattgtggagaatatgaggactgtgacgggttttcaaatgcagtggtgttgcgcgtggttttcttcgttgcagctgtgtgggtacgggcgtgtttccgccggcgttgaatgattgcgtcttcttctttctcttcaagtgtggtgcctgcctcctcgccccggagctttgcttctgtcactgcagctttgaggttgagtgggatcggggcgtgaattgaggtcatgagcttggcttggtgtgcaaaggcggcatagttctcctgcataagagcgcctgcggaagcgttgagggcagagtcagggttagggtagataagcagacatgagattgtctgaatagagataaggttagttatctggagaaattcattctactgatgcagttcaacttacgaccaatacatcgcgcagagttagattaggctgccaatcccgcttgagcgtatctacacagacagctccggtgagctcctccatgttcgggtgccatattttcgtcttgaaggtggcctttggggggctcttgggatagtcatcaggcatcttgagatggagctcccataatccttgtgaaaagggtgtgcccgcggggcccgtgaggagtatgttcagttgtgacaggtcatcaccatccgacggctgcaagtagtacggcggaagatcgcggtgtaaggcagcatggtcggcagctagccggcgcaagttcgacggctaggtatccatgtcagatatagagtacgagcatacaccggttgctgggaaaccagtgtgtcaatggttgaacagggacaacttaccatgctggagctttggatggtttgtggggtattaagatacagggtaacttaagttggagaagaatgcaaattcagaaagtgatccggaccagtgaaagcacaaggatcacaatcacaatgataagagatggttacttcgtcgacggtttgttttgagtggaggtcacactaaccttttcggtagcgcgtcagtcacgtgatgattgtcgcgtaatgtgcgcgtaactaatattacccttttgggattgccctatgttccaccacgtccttactatagcccttgctatctgacgagacatatatcagaagttaggaataaaggggtaaggttatgagggtgatatctcctttatttcttcctttgaagcactctcatcaaagccccgcatgatcgatggatatctcagatccatagaggcaatcatggcaaacaggctggcaaatgtctaccgactgataaaacatacaggagttatgaagccaaaaagcgttgtatgtactcgttaatacgactgacttagtatgttgtagcttgtcatacgcaatgaagatttttgttactgcaaatataagccagcgagctgttgttgaccttatcaaacctacaggtatgatctctagacttaatacacatgatcacacaaggaatcaaaactcttatttacccaggaatgcattaagtttatcacaaatatagtaaaaagaagtgggaaacagctgcgccgtgaatatgcgcctccgagtacaacgcggtgaaacacacgagtcctacccaatgagaaagaattacaggttccatagaaaacctggaaagataataacaaaccgccaaagaaaaataatcgattttcgcatgttcatgatcctcattgctgttgatccagagactggaacaacatggccgaccgacgaccacgaccaaatcctcgcctaattgagcttgatgtggacatcatagtaaaacagaagacggggtattgccagtggccaaatcacagactcttggttcgcttacaagaaagcaacgagggcagcaccggcaaccatgagaccgacagggccggcggtggcaatagcagcagcaccggtagaggaagcagtagcgctagcacttgcactggaagcactagcactggcgctggaagcattggcactggcgctggaagcgttagcctccgcgctagtagcactggcaccagcgctggaggcactagcatccgcgctggaagcattggaatctgcgctggaagctttagcagacaagctggaagagctggaagaatccgccgcggcgtccgaggaagtgctagtggaggtaacagtggccttggactctgtgacgaaggtagtggtgccagtaccagtgccggtggtgacagtggtttgagtggctccggggccggcgacgggcgaggtcagaccggcagggatggaggcggcggcctcctgtgaggtctcggcagcggcctggctggtgataacactgggttgggaagtgacaacactaggttggccggtcacgacgccgagagagtttgtctgggtcaggtagtcaacagtctgttaaataggttagcttatttcattcgggcattgtgatctgtttttttgtttccgcttacctcggtggtgacactgctctgggcgttggccagggcgatggccgagagggtggtgaagacgatggagaaacgcattttgatggattagagattattggtagatgaaatgatgtatgcgtagtgagtatggagaatgttgagggagagaaataaatgtgatcttagacaaaggctggggggaggtgggattataaggctggggttgtcccgggaaacaagtcgcatgttatagactgtttagtgcacacacatgttagaccccgaaatggcttttgaaatggatacctccagtcagccatcgccgtctgaatctagcgcaatttgagatctgcaaggtcttacagttctatttatgtcgatctctggggtcacaccaatccgtaagctcccccacgttcatttattacatgtatgtatttgagggtggagttatgagagacattcacctttacaatggtactggcatggataattaacagcaaatcactatgaaatgtgtctctctgtctcttgaaatcaaggtagaataataatagtgggaatagttggcagatttgacatggtggcaatatgcaccaggcctagctaatttagtgtcggatcacctgtacggtaagtaatcataacaaacatagccttggcgataataacgacatgtctcaatctcagccgagttaattattcagtagcgtggaagcttacttgccatggaagttaggagagacatatcattgactgtgtggacatacgagtccggtcagttcttgattgcggagcgaagcgaagcgattattctcccatctgactcactatacatagtagactaaacatactgtactccgtacagagtattaatatttttggggcttcaaatggcgcgattctattttggagctaaggagctcgaaccagccttctaagtgagacatcactttatcgaaacaggtatcccgaggtcagctctctatcctttcttctactatacacttggcattacggtatcactaaattatccttgtatgctgtaaggatataaccagttttgaggtctaatttatggattctacccacgtagtaattattccgtacactaattatctcgactttaggacttttgcctcacaaccagcccgcggactcttcaaatcaccagactaaggtgggtctttgagacaagtcagcggctcggttaaacccatccagtagggatctgtatatttatatcttttttctcttttgacaggaacaataacagattcctgcaatatcaacggggacaaagagggtcggcatatgctcccatcgtgcatggggtttaagcttgatcccagagcactgcagacggtctttattctggctaggtggataggtagtactattgacgtgcatattgtgtgactaggtcgtaccatatgtctacaatatagaagacaatacgggtataccttggtctcgacttgccttctactcatcaccagatgattctctagttataccgggccaagcatccgactctggaataaggttgcttttggctaccgtataggcgacatcaaaccccttgcttattgccctagtcacgccaatattagtggaggccatgctgtcagttgatggcctagactatgcatcgccatcctacagcggtgtggcgcgggaatgcgaaccgagtgcgccaaaagcgtctatatctggcaatgatcccacttacccaggtcacaagcagccgggcaggcgtactagtagtggaatgtttgtgcgacctctcggtcgcctctagagtacggagtatatcacacgaagatgcaagttgccacccctgcatcgccggcacatgccatacgttattctccaacttgccaagagcacaaagccattggttccaaatatcgtagccagcaacaagctgaagatctcaattgaagactgaactccctcgccgcaatgcatattatacagctctcccccactgcagcacataatcggaaactcaatattcaaccatcactccttgatcgacacatcctgaccgcggacccagtccgcaaactcctttcgcttggcctatgttatccaaatgttagcttcgaatattccaggcccgaaacaatgctgtccagcaacaaattcatatcttgaatgaatccaaatccagtagttccaaggcatgtatccaagtagatccaaaaactcacccgaatatcccagaatccgtaacgctcctccagactcaggtacgggttgcgcgctccgccgttccgttcaatctcgcccgcccactcgcgccagctaatcggcttcaacttctgcgcgcccaagaccagtccgattgaaacaattaataccgaaacgagggtttcgatgatgatgtcttgtgggagggcagtggacgtgaggctgctgtaaaggacagtatgttcgtgggccgagtagcctctgcagaagggtttgttagctttgctcaaggagtgtatataattgctgagtggatggtcggagaacgtacgcatgaactatcaggacgaggccgaagaaagtcaccacgcgggagaggaagctcatgatgggtggtgagtttggttttgcgttgcgggttggaggtcagtggttgagcccagttgctgtgaactcttcttatcgatggataattccagataaataccactgtattattggtgttgagatgaagcctggggtgactggctgtagacagtgttgtgatgccgttttgatacgttggcgttggcgggaggttcgtggaggcccgctccaggtggtttacctaatcaacttttgactccaagtggctcggatttatcatatctgttgcatttttcatactgctattgaagatgtttaatggatcggggtcttctctggttaataaggaggtgtatctccctcactacctacatatgcagtgaacgttgtattcattccttgcgatatcaacccgaaactagacctcgggacaaccctatcaaaacagacatactagactcaattgatgaaataaaccggtgtatttggctgaagctcaggcctattcccttatatgtttcctttcggttaattctgcaatgcatgggcaacacttactagaccagccctgaacgagggtaacactattcgactctgctgtccaatctctgtggttgacaaaggactttgctttgtctcgaacctccgttggtggtagccatacagatagaaaatatggtttacaagagagaggggaaacacgtagttagaccttgtaggctttgccggtctggaactagaaatatgaggattgaggctctctgaattacacggtccatgctatccacggtataattagctgtcaatagaataagccgtgagacagaacataaggagcatattccccatgtatccatcttttagttttctataggaatctgctatgggtggtgggaatatatatcgagatatcatctattacataccatttgaattagatagccaatcatgtctgttcagacgtgctttcaaatcattataaagcttgcctttatcaacacagaagacataaatacatgtaggagtcctcgtctttctaacgtggcagttgtccataagaaaagaataaggagacagcgacgtcaaagaaaaacaagtagttagttaattgaccaagttaggtgaatgtgatcgagtccatgagaatattgatcggttagaagctatatatatcttgagggttgatttgtgagacatcgagtgcataaaaagccgagcagttaccacccctgtaaatagggattctggggacttgatttgaacaattactgtctgacaatcatacacctataaatagcaagttacagtgaaactgtgaatggtcatgaattttttgaatttttcatcaatgactggtcactatggaccagctttctagttggactaggttcgtaaaggattcctttgacatcacgcatttccgtcacacaattcctgcttcataaatgggcatcgcaaatttacagcttctgcatggcagcgatatcggtggactggacgtggtcctcatcctcctcaatcttctgctggagctcatcggtggagaccttatcgtcctcaacgacaaggttgatctggagcttcctgataccgaagccgacggggacccacttggaggcaccccagacgaggccgtcctgttcaatggcgcggacgttggcctccatctcctcaaggttggtctcatcatctggaaatgtttgttagcacttgaactggaaaagacttgaaaaatacataccccaaggcttgacctccatggtaacgatagacttggcggcgggcttgactttgccggccttcttggccttgtattcttcgagacgcttgttgcgctcagcaacgacctcggggtcctcctcctcagagtcggagccgaagagatcctcatcgtcatcctcctcctcgggcttgtccttggggttggagggaagagtggtggtctcgggaccgtagacagtgaaagctgcgttggagtcaccggggagggtggggaattcgggctcgaaagaggcaatgtgcttgtgccagcgggcaacgttggggtacttggcagcgtcaggagcggcggggaaggccttgaaggtcacgacatcggcctggctgggcgcgtggctgatgaacagagtcagcattgatgttcacatcaaatgaaacgattcaataatgtagcatagtaaagcaggatcagaggtgcgattgctcgcgattggttgtagtcatccagcggggtcttaatccgcctcctaaacacggaccaatgtttctcatcatgaaagcataacaggaaaggaaagagaggagaaaaaaggcagcgaaaatggaaggaattcatacccaacaatgtaggaccgagtggacaggaagtggtcggccactgaggggcacagtcagtcaccaattgattcgaaataacaaaatctcaggggcgcctacgagtcaggccggcatcagagacaaagtcggtgaaacccattgtgaagagaggtgtgttggtatctggaaggagaagaaaaaaaggagaggaaaatagatgaaggaggggttaaaaaggaagggattttttttgttacggaaaatctcttacggagtcacggaaaaacgtgaaagagcgaagactggtcaggtgacttacttgcgacagtgcttacctacacaagtcatgtgaccaactggtgacttcaggacgaagcttagactagtcaggtgactgactggtgacggaggtctggttccttccgccactcagcgtgtactatgtggatcgttcgagaagcctcccgatggaccttggttatcggtatttaaggtataacagtgacatgtccgatcctgaactaccctaggtttctttttacacttttttttttggcaaatctataatattcattatggcggcgagattatccctcaatgcccgcagtcggcttctgcgaacgcctcgcctatcttcgacccggcttctatccccaatcccgagatcaagcatactaccctgcacctctatcataccaccagccatcaaccatagccctatatctgtccgcaactatgccaacgggggccgtccacaccctccaggcggtactcaccgtatggatatgagcggcggagaggacgagaaatcagcactagaaaagtatggtgttgaacttacggagaaagctaaagctggcaagctggatccagtcattggacgggatgccgagattcatcgaaccatccaaattctgtccaggcgaactaagaacaaccccgtactgatcggttccgctggaaccggtaagaccgccgttctcgaagggctggctcagcgtatcgtacaaggagatgtccccgagagcatcaaaaacaaacgggttgtctcattggacctgggctctctaattgcaggagccaagttccggggtgacttcgaggagcgtctgaaagccgtcctgaaggaagtggaggatgcagaaggcggggtgatcctcttcattgacgagcttcacaccttgctgggacttggcaaggctgagggcagcattgatgctagtaatcttctcaagcctgctttgtcgcgaggcgagcttcaatgctgtggtgccactactctgaatgaatatcgattgattgaaaaagatgtggctcttgcccgacggttccagcctattctggtgagtgagccgtcggtcgcctcgactatttccattctacggggcatcaagaacaaatacgaagtacatcatggtgtcagaattacagatggcgctttagtagctgcagccacttacagtaatcgctacatcaccgatcgattcctgcccgacaaagcgattgatcttgtcgatgaagctgcatcggctcttcgcttgcaacaggagtcgaaacccgactcgattcgggaacttgaacgtgacattactaccatccaaattgagcttgagtctcttcgcaaggaaaccgatgttgccagccgcgaacggcgagagaagcttcaagaagacctgaagaccaagcaagcggaggccagtaaattgaccgaggcctgggaagaggagaaggccgaaattgataccatcaaacgcaccaaggagaatttagaacgcgctcggtttgaacttgaacaagctcaacgcgaaggaaactttgccaaggctggagaattgagatactctaccatcccagagctcgaagccaagctacccaaagaaggcgctgaacaggatcctcataatcaaactctgattcacgactcagttactgcagatgacattggaaacgtcgtttctcggaccacaggcatccccgttaacaagctcatggctggagacgtggagaagttgattcatatggaggacactctccgaaaatcagtccgcggacaagatgaagcgctttctgctgtggcaaatgctgtgcggatgcagagagctggtctcagcggagaaaatcgccctatggcctctttcatgttccttggtcccaccggtgttggaaagactgagctctgcaagaagatggccgagttccttttctccacggaaactgcagttttacggtttgacatgagtgaattccaggagaagcacacaatcagtcgactcattggttctcctgccggatatgttggatatgatgatgctggtcagctcaccgaggctgtcagacggaagccttacgctgttctgctatttgatgaattcgagaaggctcatcgtgatatctcagcgctcctgctgcaggtcctcgatgagggcttcctgacagatgcgcaaggccacaaggttgatttccgaaacaccctgattgtgttgacctcgaatcttggagctagtatcctggtcggagcagaccccttgtacccaattaaagatgacgccggtgatgccgagctcccagaaaaggtcaaatcggctgttatggatgtggttcagagcgcatacccacctgagttcatgaaccgaatcgatgaattcatcatcttcagacgcctgtcccaggatgctctccgggacatcgtcgatatcagaatcaaagagcttcaggctagactcgatgaccgccgtatgactctgcaggttgacaatgagactaaggactggctgtgcgagaaaggctacgaccccaaatttggtgcccggcctttgaaccgtctcattgctaaggagattggaaaccgcttggctgataagatcatccgaggtgaaattgtctctggtcaaactgcccgagtttctcttgatgagtctaagtctggccttgtggtaactgcggagaccgcggaagaataaatgacaacatgaaatctagcgttcttatgtggcacatacaatgtttttgcatctgctttttttgcgaatatttcgattgcatgtccggtcttctctcatatattatggctttgtacaatagtctattctagacaattcatattcatcaagttgcttattttatgtaggctgtaggctcgaggaacgacccgtggacaggtgactaggccaactcccaccgtttcacatccccatcattttcctctctcatcccatctctaagtatcccaattccgtgggccgcgggaaaatgccttcattaaaaagaaagagaacaccagcttcccggcatccaattacacctcgtacatctgggcgacgactgggccacagggcgccagctagtcaagccttcagcatttcaagtggtcctccccgaacccctatcatttcatcagcaagtcaattgcacacaccttttcctacagataccaagatcgaaataggtgggtcggtaagagctaccgatgatgacttcgatgaccatgtcattgctgccatcgacatgaaggatcatggaactgtggggtgctcatactactcagccgaagaagaaaagatgtatctgctaggtgacagtcggtcgggggatatagagacaatcgacgctcgtgggttaattatttgttcaagtctagattagaagtgctaatcaggccatctacagtgcttctccagataaaacctacagtggtcttgacacctccgcgggttgatcttagttcccagaatcaagatccgaaccttgcacaagaagatggtacatttcccttgcactggaacaatttgaccctttccagtgcgggcaaatgctgataatttctgtctagtttcttctgcctaccttccttaccagatagacattcgtccaacttcggagttcagctactccaatgcagaaagcaaacttcttgctttaggggtttcctctgcgcacgaacaaggcctccgatttttcgtgccccagaatggtcttgccggaccggaagaagtggacccagaagagatgggcttcacactccaagaaggaagactgctgcatatctcaagttccgttgacatggataaccccgtgactattggttgcgcgggagccatactcacttacctgcagcgacgaagagccgcggcacccagccccctcgaagaagggaatgagtatcgggttcgagcactgcagatgttcaatctacgggatacgatgtggatcaacagcaatactttcacctctctccagattatccagtcggagtcacacccgaatatgttcaaccagggacctgggaaaaagtctgcttcaggcaaagagggtctttcggtctatgggctcttccaacactttgcatacacgcctcagggtagggcaagactcaagcagacatttttccgtccaagcgtgaatctagatgcgatttgtgaacgacacgatttcataggactattctcccgccctgacaatcttgcttcgttggagaagatgaccaaagcattgaaacacattaaaaacatcagacctatcatgctcaatcttcgcaagggaattagtactggcagtgctaaggttactgggttcaaaactacggtttgggctactcttcttgctgtatgtttgatttgccatcatttgtctatgtagagtgatagttcttcattgcgatactaatgaggcgactgaccagtttgcgttctacgctatcgacatcaatgatgcactgcgggagacctcgggcgcgcacatcctgactgtccgaagcaaggttaatctccaataggtatcccagtccttcttgtattgacaacttgcaggctctcagggtctttgaagcagcccagctgtacagagttggtcgtatgattcaagaaattgtaagttccctttttaatagaattaataacgcatctgactttttaggtcgacattgataactccgaagaacaaggaagaacggtggtgaagcaaggaattgatagagagcttgacagaattaaagacagatacgatggtctcaacagccttctcaagcacgttgctctcgacattgccgcaacgattccggcgactctcgacgtcgacgtcaatgtcatttactttcctcagcttgggttccatgttgccattccactcaatgagcatggtgctgcggcgtatactagtgctgatgatgaatgggaattaatgttcatcacggaaaatcgggcgtatttcaaagacttccgcatgagagagatggatcagaagttgggagatatatacggtattatctgtggtaagcctgctaaattaatgggaagcaatggggatgaaaagctaaaaaaaaaaccctaccttgacagagaaggaaatcgagattgtatacgacttagcgcagagggttcttcgatatgagaatgtgctcgtcgatgcctctgatatttgtggagagattgataggttagtctttgtgggacatgatgtgaggtccgctgatacaaatttcacagccttcttgctctcacacagggagccagcttctataatctgaccagaccacgaatcgttgaacaaaatgtactcagaatcaagggtggccggtaagagctcttcaacgatcatccctcgacatctctgacagatgataggcacattcttcaagaattgaccgttccgtcctatgtgccaaatgacacattgctgatgggcggaaatgagtccgagaccaatgaagctgtttcatccatggattccaatcccagcatgttgctcttgactggaccgaattactcaggaaaaagtatctatatgaagcaggtaagctgaattttgtctttgtgaaacacattttctgacctactattaggtcgctctgattgtctacctagcccagattgggaggtatgttcctttctattaagataataatacaaaggctaactggcacagctttgtccctgcagacagcgcggaattggggattacagacaaaatcttgactaagatcaatactcaagagagtgtctccaaggtatctcaaatcctttgtataaagtgtcggattgggcaacctaacatgtctcaaggccgaaagcacatttatgaacgatttgcagcaaatctccctctgcctgaaacaagttacgaaccgaagcttgctcgtcatcgatgagttcgggacgggaactaccgaaagcagtccgttcctatctagccatagcttttcgttcagactaattaacgcgtttagatggcatcggccttgcctgtggcatactcgattatctaatgtgcctcgagaggccccctaaagtcattgcagcaactcattttcatgagattttcgagaacaacttcctcgctttgcggcctcgactctatcttggctatatggaagttcaagtttgcgaagaaacccaggcagccgaggaccagattacatatctgtataagtatgtacaggaatgctggctcctgggtcaatggtatgtaaatgatgcttacagttcgaacagttttcgtccggggcgaagtagccagagctttggtaccatgtacgtcctgcttcttatcatgtccgcattcctttcgaatcgattgacttcaatattggtataggtgcgcggcaatgaacggtatcgacccatctgttatatctcgcgcaaatgagtttacgtctctttccgcacgaggggagaacgttattgtggcctgttcggttctatcttcagaggagatgcaagacctagaagaagcggtacgagttaacttttttataaaagaaaaatggaatgtgactaacaacctcgatacaagaactccctagtgagacattttctagagattgatttctcacaaggtgactcagaccatgtcaaggccgtcttcgaaggcctgttcgagtgaaaggatttattagtatggggccaagcgcatggaggccaatgatatcacgaatatctttacaaagtacaacatatatttacgccctaggtcatcatcaattagctgaacccgcgatgtcgatatattccattaggagaatgaaatccttgcccaccttcactgcattcgtagcaatcggggagatagtagctaggatccctgatggatcaagcacattatatacgtataagagaagatggattgagatgaataaaacggtttttgaaacttcgggtaaaccagaagatgagatcggggttatataactacacatcgaatgcctgaaactgcccgcagtgaacgccatggaaacatacacacaagaccgtggattttatgatcaagcacacattcacagcttaacactcttgaccaggtttttcttgatacccgtaagctcaccaccatatccaccgcggccctcgccgcccttgtacagttgcttagtactgccaagcttcttcttcttttcctcgtacttctttctcttcttaacacgcgggttacgcgagtctttactgcgtttcgcgtgcagacccttgttcttctggatctgatacgtgattgcacgcttgccatctggaccaacctcctcttgcacaaagatttttccaccaaggcgctcagcctcagcgtaggcatctgcacgagcctgcttgtcgtccttgcgcttcttggagcgagatgccaccatgtcgtagtattcatcgtcatcagtgccctccttggcaccctcaccgcggcggagctccttggcgacgcgacgatcctcgtcgtcactgtcaccgcccagctgctggtcggggttgagttctttgcggccgcgcttctcggcttccacattgagacgggcttgacggtcacgcagacgttcgcggtatgggagatcggcgtctccaccagcatctcggcctgctgcgttacgtttgttggctttctgggccagttgcgaggtgtagaaacggagcgagcgcttctgcttggccttctcttctgcctcatgggctgtgagggcatcctcatcaccgaagtcagagtcatcatccttgagaggtgccttgatcttttgtgtcttgcgcttccgtgaaggctcggtggccaaattctcgagatcggcgaggccagcttctgtttggcggagacgctcggcgcgaagagcttcggcttctgcctgtgctatctcggccttgctgagcttcttctgtttcggcttcttgatctcttgggtctttggttgcttctcggtcttggttttctcggtcttagtctccttgataggctccccaacgggttcctcaagctcctcgagatccttgacagtgttccaaagcttccggaatttgacaagcgatcccatgacagggtgttgtcggagttcggcaggggtcatcggaacatgctcgctagtcgcgtcgggagatggggaggaaaggagcatgaaatacatgctgatcgtgccaaggtatgcagacaacgcacggaatttcaccacaggcactggggatggctgtggctcctctgagtcgtcgtctgttgaggaagccttcaaggctgcttgttgaagatctttgaaggagctttgaaggtccacgaagtccttcgctaggggttcaaactcggggtatctcgacttcaaaattttcagcttctcatcggtgtccatatcatcagtgatctccaattgtggaagcacttcagttaccacgccagcgtcggcgccgtcctcggtacccttgccggattccacccattcagactcgtcaaacccgaaatcggcctcattcatagcctgcaactgcttcatttgtagtcgcttggcctcctgctcttcctccaatgcatcaacctcggtctcgatctgatctgcgttataaagatcctttttcgatgaaccccaggcagcaatgccttcttcatcttcctcggattctgcatcacccttctttggctgacccatatcatcatattcgtcgtcttcttctgagtcttcgagatcgtcatcctcgtctatggattcgtagccaaggatttcttcgtctgaaggctggatcaattcctctgtgacaatcagtaagacaccgttcgcacaagctcagtttatcctcaaaggcacataccctcctcggcaactctgcgccgtctcttcgcctctgggccttcctcgagtagaatctggtcgcggccggtttggaagtcatcttccgagtcgtcgaatcgctcttcgatgtcaaacttagagggctcaggagctttgttctccgctgaacgaccagcttttctctttttgctgcccatttttgcgtgtataattcaagcgacaatgagccaactcgaagtctggccgataaactgtgataaaattattttttgatccctcaccgccttggctgcgctagcctcgagtggggcgtttgctctgtttgcacctttggaaatcaaaatacgggtaattttacaatcccacaacttttgtaccgtcaaaaacagacatcgggaacgatctcgggtatttccgtatcgttacacaattatttactgccccgtgtgccttccatttcgaggacaactgacagacgcaactgccaatcagccacgatggatcctcacgcgttaattgctcgtcttcatctgcctcaacttctctcctccttacagtccttgtataataatacgtccaccctgatattaggcgtttccacactcttttgcactatcattgtctatactattgccaaaatgtttggttacgggctacgaaatgagttcaatgtcgacgggcaggtatgtgtaagactacatgattaacgcggtacgttctgactaggtatgacagacagtgttaataaccggtggctccgatggtatgggcaaagctgtcgcactcgagctagctgcgaaaggcgcaaacgttgttgtggttgcgcgcactgtctccaagctggtgaccgccgtcgatgagatgaaggtcggacatcccttcataatcagttgatcaatatagctcacctattatccaggccaaggcagcgaatatctttaagcagaaattcctctatatcagcgctgatctctctgatcccgtcgagagtgaaagagtcctcgcagaagtcacaacgtggaattcaggggctgctcccgacattgtttggtgctgtgcgggcttatctcgcccgggattctttgtcgatgtgcccatccaagagcaccggcagcaaatggatgcagtctattggactgcggccaacacagcacatgccaccctgcgccgctggctgaagcccgttgccccgagtgaacagatgagaacaccccggagacatctcatttttacctgttctacccttgcatttgttcctatcgctggctattcgccatactcgcctgccaaggcagccattcgttctctatccgatactctgagccaggaaatcgaaatgtacaacggagcctatacccagcggcaccgcaatgacgccccagctgcggatgtcaggatccacaccattttccccatgggcatcctctcacccggctttgacaacgagcaaaagaccaagcctgaattgaccaagaaactcgaagaagccgacaagccccagacgccattggaggttgcaaagatctctatcagtgccctggagcgcggggagtacctgatcactaccaattttgttggtgccattatgaaaggcactgcctttgggcctagcccgaagaatagcattgtcggtgacaccatgctcagctggctcagcaacctagtattcctccaggtcattccggaccttcgcagcaaggcgttcacttggggaaagcagaacggggttccgaacggtaacagtgctccggcttcatagcgatcgggtgtattcttctagcgactgcttcttgtatgatgataccatgagcgatgtctgcatggcgcctccgaacacctaaacattcttcaattcctttcatcctttgttgcatattctttactgtacagtacaaaataatggcttgtctgttctcgtatttgtagcaattcgaacctttcattgatgtagtcattttccggggcccggactgatgacgtacgatgtagaaacaacaagcttatcgtttatcctgccaccccattttcgacctcgaaatttctttgtccccaattgcactgcccaaactggggtttaaaaagtctttgtttcaaatatgaatggcaactgatcacagatcactatttttggcacaaaaagaaattgctgggaaagcagaaacaaaaccctcgctcctccatcgaaagactcggcgatagcgatagcacaagatacaagcaaaccaccctcgagtctttcaacactgttaacagcaatcgccgcgcaaactcgtgtcaagatggaggccctcttctcaataccggtgctgtccgttttcctcattccggtcctgtcatcctacagcaccagcctgaacctcctgttcttctacatgacttggtcaacactggtactgtcgcattcccggctccgcgtggaactgttcgggacgatcgccgtgcgcgtactcttctacgcactgccgtctattgtcttcttcctctttgacatcctgaccccgtcggctgcgatcctcatcaaggcgcaaggcgcaaccggcttgccaggtgggaggaggcgacgtcgaatccacgcgaaggaattcaagatcgctgggtgggcactattcaatctattcttgggtatcgttgtgcagggaatacttgaaacgatactggttcggacgctcggcaagcgcagtgcgctcaaggtatcactgaagcttcctatgccatttgagatatgtagggatctgagcctggcgatgtttgggcgagaagtgagttattagaattcccagactatgtttctagcttgtgtcttctttggtagtcccatttgctgacattctcattctgcttttgatagctcctcacatatatcattcaccgctacgctcttcactcagggagatctcctatactttccaactggcaccggtcttggtaccattcattggctgctccgttcccattgaccgcgcattacgaccacccggctgtctatctagttaacaagttcatccccacctatgcaccagccatcatcttccgcttccatatgcttacatatcttttgtacctgctgttgatttctgtcgaggagaccttcgcatactctggatatactgtcatgccgacaaacttatttttgggtgggattgcccgtcgcacagatatgcatttgttgatgggtggaaggggcaactatggcccatggggtgttatggattggattatgggtactgttgttggagactcgcaaaccaccgacgatgagagtgatgaggcagcagatgagccggatatgcggaaagcgtatgaggctgcgaagcgaaaggctgttgggtctgcgacgaagccaaggcgacgatgagacgaccattgatgagtacatgataaatcattgattggagctgtagctatgtagattttgtcttggttttgctgtttttatttggagtgtaaattgggattgttcaacatatacatgtgtgtctagaactacaatatatattcgaggaagtgagacttttggatgatatgatattctttgaatgctatcatcattcataccaacattggtttcatatgacccccaaatgaatatcattcgagtactatacaatcagtagctacgagggcatggttggcacttaaccctaaaatcgagtggcggatggctgccaagagtgattacacatgggatattagatctagaacacttagaagctcatcgcacatccatattgcattgaactctacggtgatatagccgagcagctattataacatgcatccattgattatctcaaaaggtgtcaagaagatatttatatacttcttactccgtagtccacgcctagatctcgagatctctactctagttccacacaatccggatatccacattcatgacaaggcccagcaaccttatattttagtgtcttacagagattacacgacgcttagatgaatcgaaggaattgcccaattggattgccgcctgaacctggaaatgggagttggtcatactgaacataaaagagaatccagcccgcctgctggaacgaggtgacttttaatcttttttttttttcttgaagtctttcttcataacgcagcttcatgcaaaatcagccacgcgcaaaaggaacgggtttcttgaaacatgagaacgacatcgggttgtccgaagtaaccgcaaatcataagaaaagtgaaaaacgtgttttgacggatcccgtaggaattacatgacatggttcatgaaaccgacccccgaaagtcgcgaaaggatgccgatctgcaatcgagccgcccctcgttggaaaaatggtcctccccaactatctaccgaacccgcggctaccacacatttaccacttcatctcgtggggcttgtcgccgtttcggaggctgaaggtggtagcgaggtagctgccgaggaaatcctccttcttgatggaggcaaggatagcctggtcgatagccttctggtcgctggcgcgagcgctggcaacaaccttcttctgtaaagacaaaaaagtaattagcatttcatcactgcaaatgtgatagtgtagacaagatgcgtacctcagccttctcgccctgcttgaagaaagcctcttcggtcttcttctcagccttcttgtccttggtgaagtatccgggagcggaggtcttctcaatggccttggcgtcaacaccgctgatgtcgacacgcttggaggtggcaatcacgtagcgggagttcacgcgacggagagggacaccgttgatcttgaaaggaccggtgacaaggaggacaccctggtcgagggacttgaggaggatgacacgcttgccacggaaacggccagcgaggaggatcaggatggtgccgggaacgagggtctcgcggaccttggcgggacgcagggtcttgcgaacctgtaaacacacaaagtagttagtctctgatgccacacaaatcctagcgattcccgtgaatccgcaagtatctcccatcgccatagccgcatcctccccagatgatatgcgattcgcacaagatcacaagatttgatgaactgtgtcgtcgattgacaccggtgtctggctggatgtcgccccgtaattcacaaaggctcttcctcagaataccggtgccatcgtcgcaatcatcggggcggatgcgtgccgggtcgtatgtcctcctcttttttgtgccgtcccattttcacagggtgtactgactttcttgggctgcgactgatcgtccacggggtaccacttctgggccttgtcggtgggcacgaccctctggctcttcccgaactgcttcgtctggccgtccgacatgatggctgctggcgaaggatgaatggttgtcggggtggttgttggagatttgagtgaggacttggactgctaagcggagtcggctccagtgcgggaattcgtcgagggttgtgtgtaggaagccctatcacgtgtttaaccgacagccctagccacttttggaaagcggtaacttagcatgctgatgccatatctgtaaggccgcaatatacgggcgactgtaaaaccacttatgcagaagcattgctcgacacaaacaactgacgtataccgctcgcagcctctctctctctttctatactctgtcttaacatcctcccgactcttttttttatctacctggagggagcgaattctgtcaatacagtatcctctattattggatctttgttcagaatcaaattccccaacatgtcgatagctccgatcatcaccttcaaagcaggtatctgcgacctggatgtacgtgagcttagctttccggataccatcatccggatatacccatattacattgcaactttactgacagcttcaatcagatctctagcactcctcccgccgtaaagccgaagccaaccccaggctatgtctacctttactccgaagatgaccttatccacttctgctggcgctcgcgtagcgcctcactagacgagcccgagctcgacctggtgatgatcccttcagatggcagctttactccctacaagccatccggcagggacgctacgaatggccggatatttgtcctgaagttttcatctagctctcagcgatacctgttctggatgcagtcccaatcccagcacgaggacggcgacccaagttggttcagtccccgtgacttgaagcttggagaaattgtcgatgttctgctgcagggcgaggaggttgacgtagagcacgagatcgccaatcttccccgccggccttcgggcggtgatgacgatgagaccatggaggacgtggaaggcaccgatcatgatcgcaaccgataccacaacgcaggtagcggcggcgctggccccgatgcgaccggtggcgacgtgcgtgaggagggacaagagtcgcgagaaggtggtgccgatggtggacgagcgtaggtacatatctccgacagccttgattcgggccatctaagctaatttgccttttgcctcatttgcagagcaactgccgagcaagattccgcgtcggttgtccaggactttttgaagtctctgggcggccgccagagccagagcgaatcccaagatcctgaacgaccatctacgacacttcaagaactccttccgccctcgaccacgttgcaatttattgattctgctgataccactactgccgatcaccttctgagcttcttaccgcccgcactacttctactggcccagggcaacgctgaggcttcggaagctgacacggacccggaacttgcccaagctgctctcctgtccctcgacctctcccagaaaaaagatattctccgaaaagtgcttcgttctccccaattcatgcaaagcttggccagtcttactgtagcccttcgtgatggtgggcttccgagtatcagtgaggctttgcaaatccccgtggctaatggaggctttatgcggagaggtggagtaccccttggtggtggcgatgcagtagacgcgttcctggatggtgttcggcaacacgttaaagaaaaggaatctcagatggatactgattgaatcactatcaatacatttactcggagaagagaagacattcggaaacttttcaaaggtgtagaactatttttggaaaaaagggaaccccactagggagcattgttcaagcaaggctgcgtcagcgtctggttaaaaccgttgtaattttcattccaggagctggaattggaggataagccagctgttatgtaggcagaaaataataaaaatacgatgtacgatgtatatggctcgtatcctgccgcggtatgtcagccacgacaacgttgaatatccatgcgcatgccgggacttgtcaatttttagtgcaattgcgatccgaacgcccttggcccgaattcagctttggaagcctgtctcttcttttgatttgtgttggattcacactctctttatttcctatattatacatattttctcccgtcaacacgtgtcgccaccgtgtcgtgtccgataaacccccccgtccagcctgcgatgtctgcgattcggtaatatccgatcctgcctgacgatggcaccagatagccagaaccttgaaaacgacgaaaacgctccgccgaaccacatccctctccaagatctctcaaaaccggccgatgctcccaacgagcgcgggagaagccgcgcgggaaccggcctcttctcacgacgatcattgatcgggagggggtcgcggagcaattatgagagtgttgcgaaagagtctccaatcgattcggctggaccgagcaggagtccattccaaccgtcaaaaacgagctatacagaggttgcttccccgattgatgacctgggtggtttcgcgcaagcgatgtcatcgattggtctcagttttgatggccctcaatcaagggcatcgccctcgtaccaatcagaaagccgtggctttgacgatgctgcttcggaccttgacgtcgtacctctagacaatttcgatccccacgacccccatggctacaaccccccagcagacgaagatgatacagtacggttgaccgatcctcgatacttacaaccgatgagcggtgctaccagtgtagaagggagacgcagcactgacaccggtcactccgcgaattttggtggtgcaagactgggcgatgatcttcctcacctggaggatgggatgggaagccgtcgtggcagcactgctcgggctcggtcgcgctctttgtctccatcggcgtctagcggggctctgcaacgcgccagctctatggtcaaatccatgtcgcagcgagtggtcaatctgagtaacgaaccggaagtcgtacagcaaacgattgagaggcaggagcttgataaaaatgcacgaatggatggaccgccagtcttgcccgcgatgacagactatgacaacgaccaacacactcaaccaccccgagagaagcgttcctccagcagattatggagggatcggaacagtccattcaaaggtaggtcacttggaatcctgggaccaaatcatcctctccgactctggctgtgtgatatcctagtaaacccgttcatggagcccttcatcttgattgttattgtcatccagaccatcttgttgacagttgaagatgcgcttcctaattccacgaattcagtgaggtggggaagcagcaagtttgactgggttttcttagccatttttgtcatttatacacttgagataggctctaagattttggtgtctggatttattctcaaccccgtcgagtacagcacactcaatcgcaacctcggcatcaggaaggcaatcgcagagaagggcaggaacctgatcacaccgcatcggcagccaacgatcaagaaaacatctacgctccaggctgagccccaagcttcaatcctgcgaacatttacaggaatgaacggactagaccctgaagtctttgatgatcctctacacaaacgtcgcattaggcttgcccatcgtgcgtttcttcgacactcttttaaccggcttgattttgtagccgtggtcgctttttggatatccttttttctttcaatttctggcgttgagaaatcacaccaactgtacatctttcgcatgttaagctgtctcagaattctacgtctccttgccatgactaacggcacttcggtaagtcttccgttgcgatgatgtggctttcgagatactgaccaattacttctaggtaattcttcgaagtctcaagcgagcagcccctctgcttgtccatgtctcatttcttatcggtttcttttggcttcttttcgccatcattggcatccagagtttcaaatccagtctcaggagaacttgtgtctggattgatcctgcaggccagagcaattacacgttgaatgatccatgggacacattacagttttgtggcgggtatctcaaccagacgggtggagaaatgccatggcttaactccgatggtatggacgcagggtacagccctaaaggatatctttgtcctcaaggttctgtatgcatggaaggcgtcaatccttataaggggactatgagctttgacaacatcctgcactccctggagttggtgtttgtgatcatgagttctaatacatttaccgatctgctatactataccgctgacactgactatctcgctacggctctgttctttgcctgtgggtttgtcattttgagcttgtggttggtgaacttgctggttgcggtcatcactcactcattccaagtgatcagagaagagagcaaacgcagcgcttttgctgtgcaaaaacttgatgctgtcgacgaagacgagacagtgtctcacaaagtcagtcctctaaaacgcatacatgataaaactgagtggatttggatctgcctcatcatattcgaccttatcgtgcaagcactgagaagctcggctatgtctgcccgtcgaacgcgatttattgatactactgagactgttctcactatcattttcctagtcgagattattttgcgattcgtctcggattggcgcatgtttcatcgaaggcgtcgtaacttgacagaccttttgcttgtaatcgttacctgcatcatccagctaccacctatcaggaactcaggtcgcgcatacacagttctcaccttgttccagatccttcgggtctaccgagtggtattggctttctctgtgaccagaaagctgatcgtgattgtgttccgcaatactgtcggtctgctcaacttgatatttttcctattcttgatgacctttttatctgccattttcgctacacagctttttcgaagccagatcccagattcagatccaagtggcacgacgatcatgatcacgttttcgaatatctacaactcatttctgggaatgtatcaaattttgtcgagtgaaaattggaccacgattctttacaatgcaaccgcatacacgaccgacttcaacacagcctggatctcggcagcattcattattctttggttcattgtgtccaactttatcatcttaaacatgttcattgctgtcattcaggaaagcttcgatgtttcagaagacgaaaaacgaatgcatcaggtcagggcttttttggaacagaaacaagtccatggagcaccccaaggaaacttagcactctcgaaaatccttcgcattggccgagattccgcccgttataaagatccactcgaccatggtcctgccgcattggaaatgttgctgaaagacgccgtggtgcaagagttcctcgacgatgaagaaactaggcaacaagaacggcaaaggccgaaggactcccgaagggtgagcacgatgccactaggcgcgactcaagagactgtccaaccaggctggatctcacttctatggacgaaggccaccacacttgttatgcggagggagccaaatcctttctactcgaagctgaagttctcacgtgcttacgaggagttggatccgagaaccatggcaagagaagttgttactgcggcagagcagagaaaacgggaccagcgagcatacctcgtgaaacatcctaattataacaaatcactgtttctttttccgccggataatattgttcggaaattttgtcaacggattgtcggcccaggacgtggcagccaacgagttgagggtgtggatccatacaagccactatggtatgcattctctgctttcatttatgcagccattgttgccatggtgcttctcgcctgcattacaacacccttgtatcagcggcagtatttccgcactgaccgcaactggttcgtctatactgacttgggctttgccgttgtgtttactattgaagcaacgattaaagtgattgccgatggtttcttctggacgccgaatgcatttttccgcagttcctggggatttattgacggagtcgtgttgatcacgttgtgggtcagtgtcggtggctcgctcaaacaggactggagtgtttccagagcaatcggcgcctttaaagcgctaagggcgttgcgtcttttgaacgtcagtgacagcgccaaggacaccttccactctgtcatcattgtcgggggatggaaggtcattgctgctgctgcagtttctatgagtttcctcataccattcgcaatctatggagtcaatctgttcaacgggcagatggccagctgcaatgacggtgggttttctgggaacttgaccaactgcgtcaatgaatattccagctcgccatacaattgggacgtgcttgctccacgagtggcggggaactcttattatgacttcgacaatttcggtgactccctcttcatcctgttccaaattgtctcccaagaaggttggatcagcgtacaagaaactgcaatgagtatcactggaaagatgacccaaccacaagatctagtggcaccggagaacgggcttttcttcgtggtattcaacttacttggcgccgtgtttgttctaaccctgtttgtgtctgtgttcatgcgtaattacacggaacaaactggtgtcgccttcctgaccgccgagcaacgttcctggttggaattgcggaaacttctccgacaggtatcgccctcgaaacgatcttttgatgacgagagcaagaaattgcggctgtggtgttatcgaatttcagttaagaagcatggccggtgggcgtggttcgtgacttgcgcccttgtagttcatctactattacttgtgctggaatactatcccgaacctgcctggtgggagatgcttcgaggtaagtttttggccagactcgaatgttacatgttattaattggtcaatctagccattatattcttggcattcatgcttgtctacgttgtgaatgtcttaatccgactaattggtcttgggtggcatcgatttagccggagttcatgggatctgtactctctcatcgctgtccccggcgctttcatcagctccgtccttgacatttcataccgcgaaagaactcatgtcgtggtggagctcaacaagcttttcctcgtgtctgttgccctgctgcttatcccaaggaacaaccagcttgatcagctttttaagacagcggcagctagtctgtccgtgattggaaatcttctagctacctggttcgttctattcttagtgtttggcattgcgatgaaccaggcgtttggccttaccaagttcggcgaaaatgaggatcacaaccagaatttccgcgatgtgcccaaatccctgatcctgcttttccgagcaagttgcggagaagggtggaatgagttcatggaggactttgcgactatgactccgcccttgtgcacacaaaattccaacttcctcgatgatgactgtggaagtgcgccgtgggcccgtactcttttcattgcatggaacctgatcagcatgtacatctttgtctcgctgtttgtttcattgattttcgaaagtttctcctatgtttatcagcggagcagtggactgtacgcgatcagtcgtgatgagatccgtcggttcaagcaagcgtgggccacgtatgatccagatgggacgggctttatatccacggagcggttccctcgcctactcggtgagctctctggtgtctttgcgatgcgaatctacgagggagagttcacggttggaagtatcctggaaaaatgccgggtcgaccctcagagaaactcgataggttctttcgcaagaaattcgacggtatcgctggttcagccacgacaatcaatgtggccgaactctcgtgtctcgtctggtgtagatctcgacgagctcagtcggatcatatcgcggattccagttcaaagcatccgagagcggcgcagacgattgaatgctttctacgaagaaatccttgtgtcagcagatcccgaccgcggtatttccttccatcagtgcttgatgattctcgcacattacaatgtgattagtgatagtaagagtctgcgcctcgaggaatttctacgtcgtcgggcacggctgcagcgggtggaagaggctgtccgtcgaaacaccgtcgtcggcttctttgataccctatactggtcacgcgaattccgccgcaagattgaccgcaagaaaaacggccggttgagcattgtcccgacattcactgtgccggagatctttgtcgacaatccaggcgacgaccccgaggagcacgaccagccaggttccggtgcaatgactccacggacacaaccagacttggatgcaaacttccctcctatgctctcaccggtctccttgcaccacagacgagcggagtccagcccaactggaaaccgcagtgctctgcctcgcctcaataccaatttgagcgggtcagtatctagctgcagcacacctacgagggagtggtcgagtatcagtccttcaatcacaccgcgtcaaatgtatggggagcacaccccgctcgacaccagcgaaacacacgaggcgccttcggccaccgatacttcgcgtcatgtacaggatgttatgcattctctggacaactccgcctggggtgagagtatccggcgaagctttacacagcggcgatcaggcgatcacagttctgaatgaaatgctgtgcctattgatgtgtctgattttggatgttatcatgaagtgagtggatagagcgtggtttggttttctactcttttttctattctttagcattcccctcgaatagattggggattttgtctatgttttatggcctgtttggcccatttttctgatttttggtgctttatactactctccttagcgtgggagcattttgcatagcagcggcgtgggattccatttcaatatttttccatagacttggatacacgattgattattgcatatcggacattaaaagagacgattattccaactatctatagaagactgcatgggccaaagtgggtcggattggttactattggcgacggaggagggaatcgagaaaaagatgagatatgaccgtatatggctatgaatacatctacttttagataagtacatacctttacatatggagaatacaaaactagcaaaagaagtccagccctaaagccattgtgtatccgtttgcagggacaatcacattcatccgcatgcgttcacccgcgttcaatccgtgtcttaaccctccctgcagcaatagtccttgcagtcaacccgttataggattcagaaaaaaagtaaatacctaggacaattctctattcttcgctctacaaataaccaattcaatcctcgtatcctgctctactatgacatagtccaacaatcaaatcaaaaacttcacaaaagcctcacattccataatataacaaaagcaacaatgcacatcgcctcgccatttctctctttgagcacatctttccgctccagaagccccaaatcaggcagcgacagctcgagcccaagttcaacaacgacctcaccaccctcctctccaacgtccacccactcgccccagagctcaccacaccacctgttcaacctatccttccacacctccaaagcccagcacatattccgagggcaccccgacagtgccaggcacacaaatactagccccggaaattcagcccgcccccgcccggcctccgacggcccacacaattccaacgccgtcagcgtgctcccctgcgcggtcctacgtggccgctcagcgatggttatccgccgacgattgtctaagatcgacctggcgctgagtgaagagcggtcgcgatgtgacgaggacgctattgagcggcaggggttggggctgatggagccccggccggtggatctggggattggggaggtaaagcctaacttcgtgatgggcggcatctttgaggttatggaggggcgggcttaggctttactttgttttctacaatattgttctttctttctttttctttttcttttttttttggtttatgctgtgatactctatttgttttaattgcctttgtatttttcatactagaagttggattgtctgcttccggaaaggaatgtgagatacaagggaatatgtatagtggctcgatattggatatatgttacatattttttggttatatttgagcccttgcggaactagctacccaatattcaatgtctcaaggttgttttgcctaatatcgttcatgtctatgtccctagctaatgcatagtactttctttttaaggttcatccattttatacttctatcaagagtcaaatgcaaaagcgggtaatgccggaccggactagcctgcattctatactccacatctttctccggggaagggctagatcagcctggagaagtgaagcatcaagccccatgcttggccctaatctccggtccgagaaacatagccatagacttccggagaagaccaaattgggggccattttgcgacacttatcttcatttataattcctcccttactaccctccccgtttgcattctcggcctggccatgatcgcggaagcagccctacggctttcatcttctcctagctatccgggatccctgtatgtccccgagcaactcacttcgtcctcgaccacatccacaaactacctagtgctgtggtctgtggagcaagggtaggtacgagacgggctgccgtaagccgctggcccctaacaatctgtagctgccatgggacccttggttgattgttcaggtctatcatcacatacctgcctgctgtggcatcagtaaatggcttatatgtctttcctgatggcagaaactagggatggttataaagttgttgtttcttccagtgaggacgtggtatcagtacttttcttgtgcttttattccggggagcctggggtttttatatgccgctttaacccatgcatatgtggcctcttgactcattgagtgctttgcagcagattaggcacctggttccagcccaaactggactcttccagttcgcttatgtaatttattcctggacaagccctaactagttaactaactagttagcaaccgttaactagttgactagacccccggttcaagggcttataaatatgaaatccattcgaaacatgtctataactatacctacctaggaactaggtggtcatgtatagatttccgcacgacccactgcccactgtgcctagtattgctagggagtcaaattgggtcacaagctttgggtataattccgctgatttcattgtcgccaagaccctaattcatgcacaaattgagtggaactgagggcccaaactggggttcccgggaccgtccctgggtctgggagagcctggtctctgactctctgggttgggcctaggttgggcctgggtctcgaccctatatttgcaggactatcctcttaattcgtctcccacggaccacaggctacggtcccacctcgtctcctaactcgaccgtcagtgcgccagccagctagaactttttatacttcctttactctatcgaaatactagattcagctatatacccacttccctcttatctattggataggcgaggatgctacgtaatgaattatgagagcacgtccacaagggctaagtcaaaggacttgaaagtagtttgaaattagtctttgttgtttgttatctgttgttaattatacataattcttgtcagggtattgtgaagctaacatatggcaaaggcaaaaaaaaaaaaaaagatgccaagatgaaagagattggaagaggcgccttatgcacttgcgttatggtcatgattgtgtaaaaacgccaagtcgctaattagacatgaatcatgatgggggtatgaaaaatcgcaaaagcagaaaagcgaggatattagcggaaggaaagcctaattaggcttggatccctggcccttgcgcttgtttggccataattgacctcggcacttactttcaccacacaggcactggacagcctcagggtcaatcttttgaggagttgtgttctcctcgccctgattatagtcaaaagttaattcagtgccggagggaatgtcgttgtacgcgaaaaatgcaaggttgtacagatattcgtcggcatgattcgtggtgcaaacagggacgatcttgcaattaggattgcatgagtggttcataaaccgagttggcgagccaaacttgcggccgtcgacgactttcatgttttgctcttcatcgtcgtcatccttcacataccagtccaaagagaaaaggtatgattgcgtatgagaaccatcggtgaggctctcgcgctcgtcagcttcaagctttgtaattacctcgccgaggtagaggtcgatgaattgcccacggtgaatcaagtcaggggaccgaagacctaataaaaatcataattagtacatatataggggaataggagtgaagggagacgaaccaaagccccgagctccagtgtcaaagatctccagtctaacagtccttcctttctgaacgacgtgattccagcatttttttccactgcagccacaacgggagttgcattcatagatgatcgccttgcgattaaggaaacttttagtcgccacaatcaatttaggattgctttcgcagatctggtaagggacgattcgatcttctgaatcttcttccttgctgaggcaatcgcattcgagtcgattgcagccgccagtttcagtacaagcacagccgatgttgaattcagaatcatccggaatccgttcaacacctgcacggtactgataactgttgacgaactcgaagttatcggctagtttagcaagacgctttggggaatcaactttcggaatgactgtaggcccattgatgcgcctaagcttctcgtcaagagtgtggcggagttttgaaagataattttgttccgtggacgatggtgggttgagagtgttgagagccgagcttgatctgaatgacaatgcgacagaacgacggtcaacacgagccctagaagtaggatatgcagcttttgtaactctttcctcttcgtcggttgtaggaaatatatcactatccattccattaactttagagacatctcgcgcgattgcgatctcccgcctttgctttgctgttggtgatggaatcacaacgctaatgtgagatggcgttatgcttggcgctggactcagcgaggatggacaccacccggatggataagggtgagcatgtgaccgcctatatcgtgcaaacttgtgaacatcgctcgacgatgacgaatctgaggtatcatcagatagcgatacctccacgcttttccttttcaatggcacagttggtggtcgataagttaacgttgtcacaaagggaagtttggcctgaactgatttctttggctagaagtgatgtttagtaaacaatccaagtaggttatgtacgtagtgccggattgccggattgccagattgatagtgagataaacagttggcttaaggggcgaagggaattggaccagacagagaacggcatagtggggccaggagaaatgtagtgggctcagtctttggaaggtcgaggtgaacgcgaacaagcacttaccagctcagaattacccaattcaatctcattggttaggtcaatgaacactcggttctgattagcccccgagccagggggagcgcgtcccgccatctaaagccacgcgtaggtgcggtagggtaaattgtaacaaactaaagaacgcgtgcgaaagcgcgtcgagcctcgcaatttcaatccctttcaggactggacaaggagagtgttggagaacaggctgctaagactattgagatgcttggggtgtcgacgagtcgaggattctagcctaaagagctaggtaaaaggaatcccggagaggagattcgagaaaacaacgtctggagatgaagaaaaagggagaaacaaaatctccaagaagcgcccgtaaaactaaaagaacctagaagaagatccaacgtctgtggcggatgggagacgtgatagaagatggaggactggaggtggtgaagaggtgaggtcgagaaaatgaggacggcaatatcatgtggtggggcaatatatgctgactcagcaccttggtccacattacctaaataggcaatgatcgccatgtgtgttagcgtctttgtggcctcaattcgaagagaaacatgtccgtattatgatttttgagatgctcatgattctcactatccaatgaattgattttaccttgtatgtttccagtttgctgtgttttgggttgatggggtatttcggttagcggctgctgattggtgatcaaaagggagttgtcaggaagtgcgggaacagcgccgggaagaattatgggtctttatttgattcccatagcttccaggcccgagaggaggctagaaatgcaggggaaaagctccaaattatagagctcagtgcctgctatcgattgatatatttatcagctagattagatgtggggaacagcgtataccgccgtctagagagctttgaagttttgactgttgcaaattcttggcatcaatatcggaccatgcgggccgcagcggacctcacttcatccaatcaacgcgctacgttattgatgactcagcgcagggggtcgcctattttggagagatttgatagtataattatctagaatcctatatacgatattataaacgggttataggtcggattattagcaatatgcaggcgtcgcgtgtgtataaagtggtaacctctaggtaggattagtaatatattagtaatcacacgtgacggatctgcacaacccggaagaaattccggtgcatccggtcgacttttagcttaccaggggcgtttggctcccaagaaatccgaaaggctgtctttttggcagactgtgttaaaacttagggctcagggcccaggggctagagttggtgttgaacttgtcgcatgggcgcaggggaccaggggtagaccgtagaagtccctagtcacataggcaccgttctcccattaccgatggccgggaccggggactccgggtcccattaatgatgtcccattgtcccatttgcgatgccccgttacccgcccccgtatacgatctcgattctctcgttttagatctccgagtacaaccatttggccatggctcttaaacacacagccatgcagtcagtgacttaagtcttcaatgttcatgacctaaaggctaaagcccaaatcacccagtactactccgtagtaagagtccataattatagaaaatctaaagttttggtcgccccgggccctacttgcaatttataaaccgaatttttttcaaaatcctctaagatgtaatgaataattttgcttatggagaagctctgtctgtagttaattacttttttattcggtttatttaggaggtatcaggagctctgaagatttagcgatcttagttgctcgggggcagtgttcgttttcgggttacttccgccaactgaccagttcggtcgggcgcccgggcgcaccgacatacccccgacacccccgcctgttcctaagttcgggcaggtgcgggttacacaccaacttaactggcgggccttggaccccgagccctgccgtgccacggcccacaacagcaggtagtgcacaactgcggccctctgcgggtggtgctcctggtgttcggtcccactggtttaccggtattagcaacgaactattgagttacggagaagatcgcatggtttgtatcagttgggtaatccaacaacaagtactattcagtacgggggctgggaatacctatgagtgcaaaatcggtcccgtgatgggccgtagatgatcacatgacaggggtctaggatcacactatcaaattgacattcatgtatttaccttgtataccctctttttcctttattgcatgtatatgcttgacttcgtgtaaaggatatgtctgggcgcacattctcctgctcggccaaaagaccattatatcagagctctcgctctggcatgtctaggaccaatatatatatatagtactgcacaagttatctgtgacacggctccggatatctcctttccattccattttaagcatattagctctgtgcgcaatacttctggtgctactcgctaccgcaagcagaagatcactcccgcgaaggatgtagctttcttggtttattcttccgggactacgggtgtgcctaagggtgtcatgctgtcgcatcggaatatcgttgccaaccgcagccttgtccgtgatcgccagaggttgatcggcaggatcgagggacatctggtagttctggtagttcatgcagggctggcagatctattaggttgaccaagtattagaagcagccaaagtgcgtagctcaagacagacctccgtctacgtaaatacatatgccaccatggccaggtttgatttcgagcccctagactagaatttagggtgttaacgctagcttagctggattgtcaagcgatatctgatgttggctcggcctcgacgttcgatctagctattttaggccgaagtcaagataaagttccgtttaaagacctcgggaaccaccagcaaccgaaccatggtccatggataggtgaaggccctgtatgtatgacctacacgggatgtggggaaagcaagccaacatacatcgttgaattacaacaataacaattgacttgaacttgtttgcgcagtatgcgatagcttacgaccaaagaactctacggaaaattgccgcaaccattttgtatttgtaggcacaacataaagttcataatcaactgtaggtacaacaccatccccctaggccacaacagcaatagagaacggtggggaaagcaaaagctaaagcaaaacgctagcaaccaaatcattctcactcgattctagtgtacaccatgaagaccagagcaagtctagctaggccaatgagtattgaaataggcgagcagtacttaggttcaggacgaaaagagcaaatgacgggctaatgaagataaatgatccctctatgagagacgggaggaaagcaaggatagcaatggacatgcaatgataacggggcagaatcgatgaatactcgtgtgtgcggatgcgtcgtaagtggacgtaactcaaaacaaagcgaataaatcgccaactatgtgccacaaagacaagggaagggggtcttggcatggaatgtgctccttggccaaggatcctacgtcaaatgggacaggtcacagtttcaatgcatcgaggatcttcttcgccatctctcgatattgccacatcccgcctgatacctttttgaattgaataccatggagggagaacagaggtaccttcacgatcaggatttcaaatcgaaggacgaggttctctccggtgtcgctctgtacacgggtagtggtttcgccaaggacacgttcgccgaccggaccaccatgttcccgtgcaacatattcatctgagccgtccgagttcgtggtgaaactgcgatccggcgcagcgtgagctcggcgatgtctagaggacccagtgcggctctcgtctcggctatcctcgtggctgaggaggccgccaaagctgatacgacggcggtgccctgatacctgcccctgtcgttctggactggagggggcaacatcaactaccttgtcgaggtcgatgctgggggcgtggcggcagctaaacccacccttgatctcgacatactcaaccgcgagctgcctcaggacccgaataatgtcagcccggataacgggcaaaggtttgctgctggtggtggagacactgaaaagaccctttaggaacactggtttggacagatcttctccctcgttggcgctctccagtgccgttcccgcgccagaaatgtcagcatcggtctcttcgggcacattggcctctcgggtagcgtctcgccgggcccggcgtgcctgaatactttctcgccgagcgtgtcccagcgacatggtacgcgccgtatgcgtgcgcccaccagtcctcgcgctggccggaactttctggttattcggaacaacctgatcagagtcactggtagacggcggttgacggtctgcagtaacgtccgaagcatctgcatcacttctccgtccggctctccgagttcggtagtctgccgaattgacactggtagatctctccaggaatttgttggaccgtgcattgcgttccgattctggcgccgctagaagatcctgctgtggccggctgtcattcgaagaggtctcgcctggagatggttctgcccggcgagttctccttacactgaagccacggtgcatcggagatgctgaatctgcaggaggttggacattgagtgtgggtgtgttgggagtgctgatgcgttcacggtccacatcgcggctgcgatctttggccctgcgagtgctaaatcgtctcaagattccagcagcagtgctttctttcttggcaggtgtgtcggggtgcgaggtagggaccgcgtgcgcagatggcgtggaagaatggaatatcttcaatccttctgaggcttcgtcttcgccatgagtgcgggcccgtggccgagatcgtcgtcctgtatccttgtctcctgccaactggtactgattggtgtgggcggcttccggaggccgcagctcaggcacctgaacttcactgtgggtttgacgaagatcaagggcaccaggtcgtgcttcggcccgctctcggtcaagtttttctttgactagatgatatgtggacaccaacggactgtaagcatttaaagggtcgttgcccagttgcacagcctccgctgaaggggcggaaagggtatcacgactggccgcagagtttcgtcgtttgtagaaatcgaacactcctcgtttgcgctctgtgtgattggaaacaggctgttgtagttcgcggaagtacagccggatagcatgttggtaatcttcggactccaataccttggtcaactgagctgtaatgtactccggaggcccaaagtcaaacccggtcatcttttcaataacctctggatctagaggtagctgtaatggctcacgctgggggaggtaattctccggagggttactaaaacccttgttcatccagggatggttcatgatctcggccaagctagcacgctgcttggggtcagtgaccagcatgcgggatataatgtgtcgacactctgcgaaacacgatcagcaatggaattagagaaagcatcctgcaaagttgacttaccagcggtgagacctggcgggtactccaccacacctttcttgattttggcatgcagctgaggcatactctggtcatcgaaaggtaccttcccacaaaccaagacataaaggacaattccaaagctccaaacatcaacttcgggtcccgtgtattgtctggcctgaagcaattccggagcagcgaaatacagactaccgcagaatgtcttcagaaggcttcttggggagaacaagttgctaagaccaaaatcaatgattttgatatcaccggtcttgctgataaggatgttctcaatcttcagatcgcgatgcacgatgctgttacggtggcagtaatccaatgcgctggcgatctgtcgtgcgaacttgcgtgcttgcttttccttcagtttgccgtgagagatgatataatcgagcatttgaccaccattgacatattcaaacagcatgtaccaatggtatgacgttcgaacaacgtcccgcatgccgcagatatacggatggttgactaggctgacaatggcggcttctcgggctgtccgaatctcctttgagcgatcggctctctctgtctcccgagtagtgcgatgttcctctgtcgagagtcgtggcacgattttaatggcaacctgcgaccgtaatcagtattgttttaagacaacaaagagttgaatatttgtacttgttctccggtctccgtatttttggctaatttgacttttcccatacttccggcacctattgttttgcctaaagcccattgtcccgtcggcgtcgtgattgtagtccgtcgcctaggcgcggctgcggcggcgggggcagtggttgcggtcgcatgctgcggcggcggcggctgtgaagccgagcttggtgtcatatcaacactgtctcgtagacggctctgcgatgaggggtttctttggtgtcttcgggcagtttcggttcgagcggtagaggggcgttcctgagatcggtccgatgacgtttcccgacgagaaggaatgcgcgcaacattagacgcctctgattctcgtcgggctacaccctcgagtgcagaatggtttgagggaggacgccggtcttcggaaggagttttcgaatatgacaagttggttggcgtaggaggctgggacgtattggatggtcgaactgccacactgcgcgtccgatgggggagatccgatggggctcgagaaggacgagaagtagttgagtggctgcggaccacagttggtgcgttagtggtcggtactgacattgtggatggggctctctttgagggatttggagcggtcaaaggagtggggagagatgagggaagccgcagccaggactcggcccgagcacagttctagcggtgcgaggagggtttcacagaatgaaacaaatctcgtaacgcgaacgcgatgaaagatggtgatactgaaaggacgagatggtgggggttaagagtaagaggaggttgggatgcggagatcatctaggggcgacacttgcaaggttggtaactaagctctcgagttgatacccaaattctgtttgaggctgggcttcacccccgattatgccccttttttttggagtaattttctaattctttagtttttttttagcttactgtttattttctagggaacactattgacatgcatataaatgctactgtgaccacgtcaccacctggctacgtgcaacgctgaggaactggaactactaatggaacgttcattagccatggtcacgtgtgtccaggtactataaatatctcgaggtcagggtacacaacgttataagtctgcatttatataatggaatattcaaaaagagcatggctgaggcgagtaatgagtatatcaccactcttttggtccgaaagtctctccatctgcgacagtctttcgaactgccgtataaagagagtcctatgttcctcgttaggacccacgtcaataaatggcgggatatagttacgtaccatggtctcgtatggagcaatatttccccaccattggggtatcgagacatttggcagaataatcgcaaagaaaataacaatggtggacagaatgaggcccgagtcaagtcctgcggcggtgatatagttgtaagtatgccaccaaccgccccatcggcgtcgaatccagtagttgaatatgaggccaaagataacccatgaagagaagctcaatggggtggccctgtgaaatgatcagtaagaggcaaccgtgaacaatagcatcgggagtgttgtagacttacggaggcagccaggccatagcacctagcatcctattgatacaattagcacatttcaccaaagatgagcttccgcgacttacacaggtgcgtttaggaacctgagcttagaccgagggcgcattcttatcaagacatagaataccaccggaagaagagcaccaatcaaccagaaccattgtatttgcatgtacatgccgccaggtccaaacatacgtcgtggaccaatgacacctaaataagaagtcagtaatatgttgatacatccctgagatagaacaaactgaccccacacaatgctggatgaaaagaatgctcttccattcgggcatgtaaaattccccgactgagtactattttcatagatggttaatacatgttctctttcaaagatgtgcataacatacgttgtgcaaacttcatcgatattgttcagggtccagttcatgactgcaatctgaacaatacttgcccataccgtggcaacaacttgacacataaaggtgatgcggggtggcactttcatataatgggccagctgttgttgaagaaaagtcaacaatttggtccactgacatggagaggaagtcccttactttgagatccgaacagtatacttgactattgacaaggtcagtcactattctgggaagagaggattgaaccttacgcttgtcccaaggtgatggtgctaaagaccttgaataccatgaccgcaatcggctttcctggaatcatgaaacctgccagaaaaggcgataagacattgagcgctatataaattagcgttgcacccacaaaaaggtcgagaccgcacgtacaaagcataatattggtgatgccgaggatcacgcaagtcggaatctgttggatgagtcagaaagaaccttccagtggccatgacaaaacgtactataaagacgacggcaatgataattgagacaaaaaagccccaccctatgtttgattagatttgatcatcagatctcgaggagtattgcatacaagggagctgcgaatcatatgccagaatgcctgcaagccctagtgcgatcgagcataggaatagtgtcgcataccaccagtcgggggcttctttgtactttttcatcatgataagatgaatgtcgggttcctgattccgagaagccctgaattgatgccatatctcctttcgatggaagagaataacatgtacaatagctgctgtaagggccgcaaacgacaatccgtagttcaaggcaaatgtcggagctaggaacatcggcgaatatgccttgtatttttcctcatcaaaagagaaaccagaacctaggattctggtcacattataggcgctttgcgtgttgtcataggtgctagacgtgttgatagggagataggcggagtacctatattgtgtcagctttgaaatgattgtggtgagatgtttcagcatacaaagccccagagtaagagatcccgattgtggtgatgattacaaaaaccacaagcccgatgaaggtgttgacaagagcatggacaggtgccaagagtggatctccgagatatgcagaaacatagctggttgtaattagctttacatctttccagcatgtataccattgacgggaatcttacgtccaatcaaacgtgataggaatgagggagagtcccgtgaagcctccgaacaactggttcaaaaccacattgttgggtcggatccctacaggcaaaaagagtcaccgcaagtcaggaatgaaacgagtcaacgggatcttacatgtgacaaaagcaaacacagagagtccttgccataggactcccggtaccctgcagttcgaagaaatcagtatatgcagttcaaattagaacaagatagacttaccaataccagataaaagacccaattgtcacatatagaaaatatcggtagcgtgaaatgctccatccgtgggtctctgattcatccgaggagctccagtcgtgaagagcataaaacagggaagtgttcgcaaattgactaggccacatcatagcagcgggccttgacatcgtgagtttttggggctcttggcaggaaaggttccaacttaccagacgaggaaacggcggaaaatgcctgccagggacataccaattacctgactgctcaaagcgaataatagttggaaaccccatccaagttccatattatatagtgctggaaagtgcgttagacaatattgaattgacgcagagatgttgcttacgcttcgctttcaatgccaagagggcatctgtacaataagcatagccgatcgacacactatatattgcttagcattgatatcaaagtttatcaagaactaccgactttgccatgatctgagaacaaaaggtcagcttaattgatttgaacaccaactttcaagagcttactgtgataaccgcatgctctttgatagtgaacggaccagtattcaacgtccatttcactccaaatgtattgaacttccgagtcggcattgtcttggcccacaaacaacctatcggatagaccagcaactgaacgacaatagcagggaacgagatggcagggctcctaatacacgatgagtaaattatcccctacttatagaccgcagaaccaaatctcacctcatgctcagaaacatattgagaccacttccaagagtagtgaagaacatgcccagcacccacgcgcgcacggtgttggcaacttctccgccatctgagttgcgcaccgcggcacgaacagactcatactgggactcatgggcgagagtcttttccaactcgagggccctctcttgatcatctgtcttgactgcctcgttgatagcatcaatcttctcctgtggcaaatttggatcccactggtgggagagttggaccttgtgtaactcttggatcgtattggttactgacttcttatcgtttggcatgtcgagctgggatgggtcaaggccctccgtgacaggtagatgcgaactcattctgcaacaatagggcaacaggtaacctggttagggtctaaatgagatatcggcttagagttaaaaacttctagacatggcagcagggctggaataaatacaaaaagagagagatgaaaggagatattaaaggagattatctatcacagcaaatggccgaggcctatactccgtacaaagcatcagttgagcttgagttttcttatctcaactaggaaatggctatactaccaatgtaggtgtatgtatgtagacaagtccaacccgagccggatcctgttgccggtctagccgttaagatgataagtttcttgaaagacaatgtagattttgatttattccccgcattccagccctaatcgcgcttgctattcttccgtcaagataacaatctacctgctttaggtataaatgcggagaaaggccgcgcaactttatgagctagtttagtccatgcgatatgaacaaaaaccaaccattcggaccgatcagcgacaggggatataatgtcggagacaccacccgatgtagtaacttgtggtaggacttattcattttaatctagggcgctacaatggtctgtgttcgtttacacaagcctatctttttgtttttctgtctagtcccaggaaagagtttcttatccatttcacatgtcttcttgttccgatttcctacccctgggagtcaatttaaacaaagatactttttttaaaacaaacaacaggcaaagtttagctattttcgagcgaaacagagcgagccgcattctgcctgacatggtatctgtcacgtcacccaggggcattgccatccagcgtgcacaagtcgacacaatacgcgacaggattgagcgcatcaccgaggacctcaaagatatcaaggaatttttccccatcaagatatctccgaggagaacacaaaagttacgccagttccttacatccgagctcgactcactccgcagccagccctttgatctttatgatcagcaagggaaggtagattatattctcatgaaaaactacctagaaaggcaactccgcgagttggaactcgactgtaaacaggatgaaaaaaccgcactgcttctaccattctcaggcaagctgctggagctgtgtgaagctcgcgttatggtgttatcgatgaatgcaaaagatgctgcccagaagcttgttgaatcccaggctcaaatctcagccgtgatagacatggtcaagggcgattcgaccaagttccggatggagaaaacaattgcatttagagcggcgagaaatatagactcattgcacgataacctgaaagaatggttcgaattctacaaaggctacgatccgtcgttcaattggtgggtgtcacatccatatggggttgtggaaaaaggattgaaagatgtctcagcaagtattcgagagaacttggctggcatccgcccaggcaacgatgatgcgatagtgggcgatcctatcggtcgagaggggttgcttagcgagctcttgggtgaaatgattgcctacacaccggaggaactaatctcgatcggagagaaagagttcaaatggtgtgttggcgaactgaagaaggcatcacgcagcatggggttccaggacaattggaagcaggccctagaagaagtcaagaatgattttgtcgagcctggaaaacaaactggattagtccgagatctcacggtggaggcaatctcctttgtcgaagatcaccaactcgtcaccgttccgccggtcgccaaggagaattggcagatgtttatgatgtcgcctgagcgccagaaagtaaaccccttcttcctcggcggcgagtgtataattgtctcgtatccaaccgaccagatggatcatgaagccaagctgatggggatgcgcgggaacaacatccatttctcccgcgctacggtattccatgagatgatacccgggcaccatttgcagatgcacatgatcgcgagatacagaccctaccgccgcctatttgacaccccgttttggattgaaggatgggctctgtactgggagttcattctgtggaatgacgaacggttcagaaagacgccgcagaaccggatcgggatgctattttggcggcttcatcgatgcgcccgaattatattctccgtcaagttccatcttggccagatggctcctgaggagtgcattgatctacttgtcgatcaagtcggacacgaacgtgccactgcagaaggggaagtgaggcgatcattaaatggcgattattcgccattatatcaggccgggtatatgctgggtgcgttacaaatatatgcattgcggaaggagactgtcgagacggggcttcttgctgagaaggaattccatgaccggtttttgaaagagaattgtatgccaatagagttggcacgagccttgatgcaggatcaatcgttatcgcgtgagcacaagccgtcctggaagttttattccttgtagaaaatattttgtcgcggtgagcagggtgatgagaaataaatgaaaatattgttgtctagttatatatcgaagagcagtctgaccacggtcggctagcaagcatggggattacacagaccgtagtagacatccttatctcttaatgcagcaacatcctataagctcccttctcattctgtgagtggtgattggactgtcttctccccttcaggattctggtgcacatgaaggccccgagattttctctctgcccgaaagataaggccactacttgaggattccagctttccccactgcaatatatatatttccatgaatccaacacttagccaaagcacaaactacccatatctatgttttggcctcatccttgaaagccagaatagcccctggttttcgggcggaagcgtaatgacttctctgccgaggtaggttaccataattgaaatcttccttgcttgaaaccccaaagacgacattttttacctcagtgaggaactacaataacgtacaggttggagttaatgtgtcattatcattggtggatctagataccgggtgactcccactggccgagctgtgcttctaaacgtagtctatgtaagcaagagatgttggaggcgtacgtgggacactcggatgaactacgtcataggcctagacaagaagcctggggctaatacagtaacgtatgacttgcataggatcggacagcaaatcagccaggtccaaccccgcagtcgtgcatagccacattaggtgttaatgacgagtttacttctagacaaaatcacatcttctagaaaagtaagggctgtttgaataagcacgtgtaacgcatttcctgtatcgtgaaggcaatacggaggttaagagcaacaaaataaatcttacctcagagagacacattactctgtgtcaatttaggtgcgtagtattgttgattccctataataatgatcatgacagcataatattccatggacaactatgtatgctcttgggatagctacattaatggggtaaaggtgcccgttcatacgtcatgcagccagatgtgtgggtccggggatagtttaggttgatctcaaccgacgcatatgtggaataacatttgaacgaacgggctttggaagtagatggaaagtttgagttggctatgtttttgagagcctcaaataatgttcacgtgtgtattataactgtaaatcgaacgctttgtcttcctactaagatgaggtcaggaaggttagaaactgtaaactgtggatagagccggggggctacggcaaccaagattccaagattccaagattccgatgtttacaatgcagccaaccttggcgatgtatgtgacctaaggaaactgtgagataccacggtgatgtcatcatatcattgcccctgccccggtgggactccagacagcataagtagccttctacttcccttggaattgacctattcttcatcacaactcatcctctactatctcaaataacttttcaaacaaccaaacgctcaacttcaaaatggagaccgccaaggttcgtgatcaaccaaaatctcttggtatttgctttatcattaactaaccaacaattatagaacgtcgttaactacgtctctgagaccatccagggaactggtgctgaggcttctaaggaggctaacaagagcgtcgccaaggacagcgatgccaagttcaccacccgcgccagtgctgccaaggatgcacttggcgacaagacggacgaggttgaacacaacaccaaggccgatgtccacaagggtaagctggaattatcgaacaaaactgctctaaaacggcactaacaacattccagaggctgccaagcactaaagtgtcaccttcacttgttatgtacaccatctagacggaattccggtcttttgatgatttgacgaagtaaatagttagcgaacaataccatctacaatttacgacattcacaatatctacagatagacttttagtaattaattatgaggcatatacttgacctcgcgtagaagttgtaaaaatgactgacatgtgcgttgacatgagcctgcctgcaaatcgaatttacaaaatataaacctttggcactctcccataacaaacagcaccactttgccacgtggtatatttggaaactagcgcagagcctatcggccatataccgaagatggtgggtgcttgttctagtgttattgggtggtcggcgctggctagactcatgattagaatgcatgaatcggaatcgggacttctggattatgaccggacttgtgataagaggctttatgcatataagcagccttgggcgtgcgttgtcagagctggatcatggtataaagctctgcgatctctgctcacccggtttacccggtttaccctgttcaccctgttcaccctgctcgactgctcttgccaggatgcatgaatcagaatgaggactactagcttcttactggtcttacgataagagacttcatgcatgtaagcagccttgagcgtgcgttgtccttgtttatggtctgaagctctcaccccgcttagctgctctgctcttgccaggatagcggggtccagccatccaacaagtaattgactcaaactatgaagcaagtaaattgattcgggcttatgaccatttgccagggtaaagatgttatctattaccagtgcttggttattctgaatatataaacggcaagaaaaccacccactccttcttagattcaatctctcaggactcttgcatccgaaattaaaccctaatagtaccgacatagtaagtttaggctgtcttactacactattctaggtaaagattttacacatagctaatgtgatacctctagggctattacctacctcccaacacgatgtgttataacatgataacatatagctgcggccacatcctcaagtcgcagtcgaccacctgcccatgtgacaagaaggatccggacatgacctcgagcttcaagtgcaaaacaacatgtaaggggtgaaattggtcaccatgcttggccgcgccggagcctcgtggcgctcgccaaagcacctttgagtactgaagggtggacaaattaccaaggtttctagcagggatatttgtttcaattgctggcagagtagctcttgcaacttgggaaggagagtggtaaaccacagctatttattatcttgacctcggaggctatcaaatattgtgcggttaaattgctatgactgaccattcctacctagtaatttatcttggaactaggactgaatcgaccttaaaatcgttcacttgcgatgtctcgtcaatagggctcgaggacgtactcaggcatcaataatggcctcaggcatcaaaccaaagacaaacttctcaaacaaccttggaacccctggagaatatctcaaacaagtccacaggcacaactgtacctgtacctacatgaccccacgtcctcagtgctaccttggatctgacaatcccgatgttctagactgcattaactgattggcgtaccacttgacacagactggtggactgccaatgagaccctggtagatgggtcggcaacgagttgaaacgtgttaggggtgccacaggaaaagctagtcgatgctgacgcaaaatctgatctccagtgccgtggaaacaacaaattatacggagtacatacctatgtatgaggacttcatgaagacaagtggctacgttgtggctcccttttccaacggtgatcagcattatatccatgacccaattctaattataactagtccagaccaaagtttaccaaagtccactaaagtccaccttttttttctctttcattcgtgcgcattatctttgtctcacatccgcttgtctttcccattcaatcgccccgttcccctcgtttaatctattttatttcgacttcatgctgggctcttgatctactccggcccctcgttcatgccggatagtcattcgttactgctttgacgtaatggatctacaacaattgggcttgcatgcccgcacggatgggacagataccttccttgagctcattgcaaatccatttcggtctgcagtaagtcgaaattgtttgcgaggaggaacaccacattgacaagctatagtttacagtcactgctatttgggcctcgctaggcacctcgatcggcgtcaccgtcctcctcgctctcctcttctccctagttcgaccccgtcactcgcttgtctatgcgcccaaagtcaagcatgcagacctcaaacacaccccgccgccggtgggcaagggcttcttcgcctgggtcaagccggtgatcaatacacgggaaccgcagctgatcgagtcagtcgggctggacgccgcaatcttcctccgctttacaaaaatgtgccgcaacatcttcatctttctcagtataatcggctgcctcgtcatgataccggtcaatattacacagagcaagaattctactgactcgacggcgtctgccgccttcaacatgatgacgcccctcaacatcaccaaccccatggccatttggagtcaagtggtatgcgcctgggcttttgatcttattgttgctttcttcttatggaggaactatcgcgctgtgcggaacctgcggaggacatatttccaaagcgctgaataccagcgcagtctgcatgccagaaccttgatgatcacggacatccctgtcaatagtcgtaccgatgaaggtattctgcggctaaccgacaaggtcaatcccacctcggccctcccacgagctgctattggccgcaatgtcagggatttgcctcgcctcatcaaggaacatgaagaggttgtccgagaactcgagtccgttttggccaagtatcttaagaacccggaccgattgccagcgaaacgaccgaccctacatccccctcgccgacaacgcaaacaattccccggcggcaaagtggacgcgatagattatctatccgtgcggattcgcgtcttggaagaggaaatcaagcatggccgggcgtcgattgatcgccgaaacgcgatgccgtacggctttgccagctgggacaatatcgagcacgcgcatgctgtggcatggaacgctcgccgcaaacgccctgagggcactactattgctcttgcgccgcggcccagcgatatcatatgggaaaaccttccgctttcaaaatccgcgcgcaagtggaagcgactgatcaattttatctgggtgacaggcttgacactggtgtggattgttcctaacggtttgattgccattttcttgtccaatctgtccaatctgggcttggtatggccggcgttccagacttcgctggcaatgaacccaaacgtttgggctgctgtccagggtattgcatcgcccgcactaacttcgctcgtgtatctggcgcttccggtgatcttccgtcgactttctatccaaggtggtagcaagactaaaacatctcgagagcgccacgtgctggggcatctgtatgcattcttcgttttcaacaatctgatcgtcttctcacttttctcggctgcttggtacttcgtgtcgttcgtggttgacaaaaccaaaaaccacgatgacgcttggcaagccatcttggaaagccggatgtatgccaaattggtaagcgctctctgcaccgtgtcaccgttctgggtgacgtatcttttgcagcgtaatctcggcgctgctattgatctggtgcagttcgttaccatggcttgggtctggttcgccaagacgttcctctcacccacaccccgacaggcaattgagtggaccgcaccgccatcattcgactacgccagttactacaactacttcctcttctatgccaccgtggctttctgtttcgctaccttgcaacccatcgtactgccggtgacagcattgtattttggtgtggatgccatgttgaagaagtatctattgatgtacgtgttcgtgactaagaatgagtctggtggtgcgttttggcgtgtgttattcaatcgcatgatcttcgctactattcttgcgaacgtgatcatcgctctcgtggccaaatcgagcggcacgtggaacatggtgttctgcgtgattcccctgcctttcttgatgattggattcaagatctattgcatgaagacgtttgactccgattgcgagtttgtaaaccgtgcaaatctaagcgatgccgaggccttaggtgtgaacacctcagacaagaaagcgtcagaccgtctgaataccaagttcggacaccctgccctgtacaaaccacttttgacacccatggtgcacgccaaggcagccgcagcactaaaagaaatctaccaaggtcgtctggaccagggtgacatgggcggcgagtactcagacattgcaatgaacccgatgctggcctcccagcccggcaagtctgccgaacccgcgcccttcgaggtcgtcccggagaaccatctagacttctcctactacaaggatcgagcagacttccgagacgagttcggaggcggcatctacggccggcctgatgacctgatgacagagcggtcacatacaccccgcagtaatttgcgaggcgagtggtctcccggctcatctcgtgcctcatcacccgcaccctctctgccatcaatgccgctgaacatgcacaagggttacgaacacgaacactccgacccgaccgggcttatccacccggccttccgtgtgccgctatcgcggggcaacagtggcaggtcggctgcaaacgcagacgagtcggagtccggactcctcagcaatgcacaggctcctgggcagacggatatcacgaatccgctcggtcgctggaggaccggtggttatggaccagtcgaccaggaagacgagccctcgtatacttcttacgacgcttaccgttcacatgggtaagctgttcggtcatattagccctgctgggcgaaacatttgcatctgtatagttttgtattctacaacatttctcggggggactcagcgtcatttctaaacacgaaggtcacgatttatttttttgctctgctcaaggcacatcttggaaatcaccatttacacgaagtggacaatttaaatatcatatttaatatcaaaatatcaaacttttacaaacccattcaacacatcttcagatcaatgccagccataaacacaggtcaagcctcacgtgagtattcagggtccagccaatcagatcagagtaccccaatcgtggaatccaagccgagcaagtgcaatttgactctctacagttcatttactgagaatcaaagcctgactctaaaaaatgaaccaaccgtgaaaaaagagctgtcagcagtgggtggtccgagtcgcagcgcgccaaagcaccgacacagctccaacccaccaacaaccgcaacctcccgaggctcacgagcgctctaatacacagcaaaataatggcgtggtactccatcctcccgccgggactcaccgaactcgagacctggttagctcgcatcttcgtgagtttccctctttcctctccgactttaccccccctcgtgacgcaccccttatgacgcagtcgctgacctaccccggattcgcagttcttcctcggtctcatcaccattggcccctgggccttcctcgtactcctagacgcaaccatctggatatatcgtatgaccctttgggaggtcccctggattggtggacgagcacgtggtcgccagcgccctcgcgcgccgagcttgaatgaacgcccggacgggcaacggagggcatttggactgcgcggcgtggagacggataccgggagcagcgagggagaaaatcaagatgattctccagggcgaaagggggagaaagatcgtgacgactctcagaaggagaatgtgagccctgttgttgtccaagcattaaatccacatttgagtggagatggtgtcttgaaacaaaggagctcggggcagatatgatgattggattgcgtctcctttggaatagtgatgatgtttatgaatcttgtgttattgttgtctcttgtcgctttgactatatgagcaagcatacatttcttttattgctcgtctcgtcttcccaggttgtgtgtgagaagacttatatacctatacatcgaagattgtatgatacttccagagtataacctacaatctattatacaaagccctagataatgagtagccaatcttacaataccccaactgtcttatcttgaaagtgccaaccccgcaggtcccgacatctcggccgtgtgagtcaatcagagaacaatggacggacagttcggccactcaaagtggggagagataagctccaacacgactctccaagccaagttcgctttctagtgaggagttcatgcggagtaggaggttgttcaaggataaaactctccgttgagcagggatctaaacttcgacagcttagatccactccatagtgatttgagcaggatggcacgcattctatacaaagccattgatacaccatggcctccattctccatatatctgttctttgctcttatcgtgggcacatgtgctgctgtgtggagggttcgacaatcccgtaaggctaatgcatacgggaggacgaagacaactttctcggacaataagacatcccccatcatacctcttgaaggattcaactgggaggagaccgagccgttacaattccggccgtttaaagggaaagacaaatacaacttgaccatgggtgagtccctcgtctgatgctatacaaatataccatactacaccactcgacacatatcgagactaatccatatcagcacttgaaagccttgatccgtccgagctcatcccaatggacaaaacatacaaggaccgactagctctccgcgagtccgtaatcgaccagcaccacgacatcgtggtgggaatcaacaacgaccaaaccccagaggaggatcctcgcatccgtcccgccattagcgaactatacaattatgttctgggaacatacctaccaacccgatatccgagcatgttccgtctaaccgttggaagctcgctcttccacaacctggtaacaggcgcaacgtggccgacaacgctgtcgccaacgacgccaacaatccaagccctagaaatcctgacccagacggtagacgaggatttcctgatcctgctccctgagttattccccgaaaatgaggaacagccgaaatccgtactacaggcatatgcgatctgtttcccggctggcttcaacatgagcgagaaactcgggcagcgtttagccgatattcatgtgccggtcccggggtatcaggaaaagattggacgcagcatggatcggttctttgcgcgcattgaggttgggaggtttgtgaaacgggctaattggagtattactattgacacgggcctgtttgctgcttttggtgggacacatgctgagccggggaaaaaagaggaggctattgagcccgggaaattgaatgttgatcaggtatgttggcttcgaggaagtccatttgatcggatagtgctgatatcactaaagacttgtctccgatgtgagcgtcagacgttgcatcggctgccggtgtccaaggctctcgtctttaccgtccacacttatctttatccaattaagcagattaaggatgagggttctggtgaggaccttgcgaacgcggtcgatggcttgaagaggggtaatgtgccaggaatgcatatttataagaagggagatgtgtggggagaagcattgaaagacttcctaaggacttagacacttcagtatgttggagttctgcgcaagatacatgaattatatggtatatatgacaccaggcttggactcagaaagggcgtttctttatttatatgcattgtcaaatttttggtttgattcttttaggcctccaatgctcgcaatttagcggaggcgctcgacaaccttgataagatcggccgaaacacccatagcggtaacttcaccaccggcaccggcaccctgcacaatcaggggattggcaccgtagcgcttagtgtaaaagctgatgatgttgtcactgcccttcagaccagcgatggcgctgtccttatcaaagtactgcagaccaaccttgacagccttggcggcgacatcaatgcttccaacgtagcgcacaaccttgccctgcttctcggcagtatccttgatgttggccatttgggcatcgaactcagggagacgagtcatgaactgagtaatgccgtccgcggatgaaggcagagatgcgagctcagcggggatcagcgactcaatagggaaagagtcagggcgggaaacctccagaccagcaatacgggccaggatggtcagcttgcgtgcaacgtccatgccgttcaggtcatcacgaggatccggctcggtgtagcccagctccttagcctgggcgacgacagcactccactgggcatcagaagcacctgatgcaggggcaaaggtgttgaagaggaaggagagagtgccagagaagacaccctcaatgcgggtgacctcatcgccggtagcaaccaggtccttcaaggtcgacaacacgggcaggccggcgcccacggtgctctcgtggtatacgagagccttaccctcagccgcagaggcaaagatatccttccacaaggacagatcatcggagaatcccttcttgttgggtgtcaccactgagatgcccttcttgaggaatgtggggtattgccgggcgaggctaatgtcagaagtgttatcgaccaaaatggctcggccaggtgcggaggcgaggtatgtagcgatttcttcggcctggagggcaccgctcttggtcagcgatggtgcggcagcagcagtggcccaatcggcggcggggatggctggcgaataggcgggactcggggaaaggagggtctgggaggaacgggcaaggaggacaagctggggtgcattggggagacgagcgagctgttggaggaaggccgtaccaacgcctccgacacctaattgataaaatcgttagtactcaattggttggacttttaaagctcagtagtgagggacacctaccaatgacaccaaggtagataggactagccgacatattgctgattgatgattttttttcttgattatttcgatcagcttaactttctgattctcagtcaagagtccaatatcagatcaaaactaagagaacaatcaattgactcacggcgcaatcgattcacctgagtagtgggggtgcggggctgccccgaatatcggcattagtcattaagagcggcagaaaatgacataagggttggcggtgtatattggcttatcgataagccggtggctgtaggaaatacggtaaactccgcgcgtgaaacctgtaacttcttgtcactacacgtgtatcattcacattatcatgcctgctgatcaggattccctctacgggcagccgcgccaaaaaaagaccaaaaccgaacaagtcacctcctcaagcctcgccttcacctctcagctctcttcactcatcgcccaagatgcgacctcagcttcgtcgcggggacgccaccgtccctccaagaatccgaagtctgatatcttttcaaagcacaacaaaggtactcagaagcgtgcagctgccgatcttgcagatgacaacagggctctcaagcaagttcacaggagcacccaggacattggctctgttgacgccatcacactgggccggtctcgacgtcgaatgcaggaaaaggcgcgcctctacgaagatatgaagaagggattacatcttgccggtgatagtgatgatgatgatgacatgtcggctgatccatccgatccggacgcctacctagcccgactaagacgcaaggagaaggacgtattggttgattttgatctcaagcacgcaagcgaggagcaactcaagcaagatgagtccgatgacgacaatgcatccattgtttcctacgaagacgaatttggccggtctcgccgtggcactcgcgccgaagccgccgaagcttctcgcgccatggatgaagaagcgggtgccaaagctgcccaagaacgctggcgccctgctcgtcctgacaatttgatttacggagaggccgttcagaccgaagccttcaatcctgatgccaacattgcgtcgcacatgtcccatctcgccgctcgtcgtgaccgctcgcctaccccgccggagaagaagcattacgaggctgaagcggagattcgcaaccgtggaactggattctatagcttttccaccgatgagggggagcgcaagcagcagatggaagaactccgagttctgcgagaggaaactttatccaagcggaaaacggacgaggaacggatggctgagcgcaaggcccatttacagtggcgatgcgaagagattcaaagactttctaaggaaaatatggagacgtggcgcctagaggaccttgaagccgaacgcaaccccgagccaaaggtagcccctccacctaaaccacccccctcaaaatggctgtaccctgagtccgaccccccgtatgactggactacatgcccactggcacgacggtacatgttcatggatcatcctgaaccagacgatatcgctggctttacaggggataacaacgctgcaaaggatatggacacttcgtaagtttctttcatgatgttccgcatgtggccaagtgattcctcatcacctttccatcgcatctgctcgcgcttcaatgtgctttctggtttctactttgcgtttcttttgtatatgtgatacccctagtaagttggcttaaatttatttctaaacaatggttttggttgaacctagtctacgtttaggcctagcagaaatatgggagcgaagaagccatggagctgtagaggttccacggcgaggacaatccattatagacatacatatgtccaaagaggtaccaaactagcaatccggactactagaaagaaatccacggctcttgaaatcttgaatcatcgcaatcatatcaacataactcataaatcatcatgtcagaacagagattccaattaaaaaccatcagtccaactgttcctatcataactcaatcgcccagttcatccatgacatccacgaacatccgagcatctaaacaaacgtccaatcagtcaacaatacccgagactgttgcgtccaaccacttaccagaagagcgcgtgaactccaggatatgataaccttgtgaggtctgcggggggtcgtaatcatcgacagacataaatatgatgggcttgatatcacgcacaatcaccgttttggaaccctgcaacttaagccaactgcgttttccaaggttgtgggtgacgaatgctgtccagacgggtgtgctgtgttcattttcattagaattcattttcgatgtttaattcgtacaattgacgcttgacatactgattcatctcgcctaggtggactgacgcctgcattcttacggctccagtcaccgtgtctttgtatacgcgcagcgcatgcatgtacccatcgtcggtgatcgggctagaagatatcagcctgtctgaactcaattatccttggtatggtgtggattgctcacgctccaaagcgttgctgttcgtgtgtcagctcgtggtctaggatttctcctataggatggcctgcatcctgggagcgcaaggcgaggaatacgttatggaatatcactagatctgaaagataaagctgtaagtatgtcacttcaacagcccaaggcggggttttcagattagcattgctgaccttccaatgtgctgaacttcaacagggtccataaaacaagctctgttccatgattccgccgcctgcacagtcggaggcaagagccatctcgcatgagctcgagtaaattcagcggcaagcagtagtagtcgctaggccccgtccggtggggcttcttgcaaaggatgcggacacgatggtctgttttccttagataaaaggccacacgcatatcggactcgtcgtttaggcatctatactgtgttaaaatgtatgctcaaaggagtaaaatttcgcaacttgcaggtggatgagttcctcatagcccttgtctttaattgattgtttaatgccaggttgagattctccgcagcagcgtgacctattgccaaaatatgttagccaaattctgagaactaaaccaagctatctataactcacttttctctcgaagacggtagaggagtgttggtagtattacacccgaatgtatccttggcccagtgttcttgaataacatccgcgctagtactagcggatgtcgaagtgaacggcgagagcgggatatccgggacagacggcgggaaatccgaagaagtgccggaggaaggcgacattggcggaggagacatatgcgacggccgagcgcgctcgaatgacctccggcgccgtctgttcaggtcaataaccgggcggccactcgtcggacgttccctcaccgggcgctcccttgggaggcgctcccttaccgggctcgggggagtcgctgggcggtggccgataggcgagtcatccgggcggagtgtcatgccttcaaagcgagcagcgaacagaccatcttgtatggagagtaaggccttgaattgattgacgagcatcacgagggttgacgaggtatagtgaccactaacaacgaccaggaataagtacacgcatgcgcttgtctactagttttgcctggcggagcacctactctcttaccaagtcatagaactctttaaaggccgtcttatacttggctaggcgggctgccagggagtagtttgattgatcccaaaagaaccgactcataaatgcccatgtgcgcttgtacatcgctggactagcatctgggccatcaagacgtctgaaaatatcgccgatatcctcaatcgtatatgtgaaactggcttgcaccacggtcaaatcgggtttgatcatttcaaaatagcggcgatttcggggatcttctgctagatgttgcaaagcggacaaggatgagctgatggcgaataactcggacaagagcgccgagatctcgctcatgtgttctgggagagggtctcggaatgtataaaaaccagccgccacgtcgtcggcgctctcacgagacgcgcgcagagcctgagccatattatagtacagggttaggccatatacgggttggtgattttcttgggggaggcgcggagggatctggtggggagggctctctcgaagggggagggggctagggaaaaaattaggaactaaacaataggccaataggctcacatgcgcacaattaacattatttagaaaagacgaaacgaaaaacggaaagaaagccctcgagataagaagcgggaaaagaaaaaatctttgcccatgaggctctcgagacagggttgtcccaggaccgacgtgttcacgcccgaatggcggggcttgtggagtcttggtctcatcgtcatctctttcgcttttctcatagaccgcttgttcacggatgtatggaggatgtagagaatatagagaatggctctgtatactcttataagctcggtataagcttcagttcatagggtcgtcccggccctaaatgcggagaagtggtcaattttatgcttatggctctcagttagaccaatcataggagcgctttggggtaatactccatatggagagggaataaactgtctaacatgagatatgcccgatataactagccccactaggtaaaatacgtggcatacatatgttccagataaactctttcccggtttgcttgcatatgatatcaaagtcagtgaaattaagtaacagaaagccaatcctaccaagttaattggtttccttgaaatctctagataaatgcgcttcttgccggacttctataccccacaaccagaagtctatatataggtaatgtcgagcaagtaccaccgaattacgggtccctgagcgggcttttgcgaggtccgatggtgtcgttaatccccacttcatatccccagtgatttatgccatagcgagttacacattccctggttggaagaaacccgcgaaataccagacaccgctcttcacatacagacgatgctagactctatgaggccgactttaggacactatagacccaacaaatgtcccgctctactagcggatgttatcgttgaattcggcatatgaagaggtatagcttgaggtagcgcgattatcctggacagtcagcccttcgtaaggtgacggagcgctgctggcgaatgcgaggtcttcggcttctttgcctatagacaacattaaaatgaacgcaccgtgtgatcattgcgagtgaataaaagagaaggcacacgagaaacgggcctagtcgatgtttgctgatcgatcaagagtcctagatgggatggttccttccctgctcgaagcagctggggcgaaacatgatagaccagcctaattcagcaggcgagaggccgcgacaactgatgtctaaaaaatggtatctgacagaagtgggagtcagatgcaatcgcgagaaacagttgattttgcgtgtctctaaacgacgaaatattgcagtcaactctcgaaactggtcatggaaggtactctgttacccccaaagaataaaaggaaatatatacccactgaattaatctcaattccaccaaattatacggaaagcgttgatttcgaagttctgggaaagctgtatgaattttacgatcgtttaaaccgatcagccatctggttcacgtaatgatacggtgatgggtagtgaagaaagcttgagcatcaaaacggaagggagaaagccatcgatcgggatcgagagcttaggatcggaggtctcacgaacccaagctgcagatagtgtacatcgtagttttagataccgccttgtgatcgatccaggtggcatttgttcgacttctgcaacatagatttagactctccaatgaaatttccggtcagtaaatgcagaaacattggttggaactcttccagcatctgaaacaaatccaaagttaagcttcgagcttcgagcttcgaccccggattcttagggcggtgaatgacgcaggcggtgagacacgcccgattttgcggggcaaaaaagctcaagagctctggagagctcccgaagcttccccgaagctcgacagccgaagatcagacctaaagtgaggcgaatctgaacgcggcacacaagacccctcgcacaacagactaaatcctgattttgaatcatccccataagctagtgatattgccaagacttgcttgctatttttacaaccattgaaagcttaatggaactggccttgacactaattaaaaaaaggttgagatttcccattgataacttaataccctcgataagagcaaagaggaacagttcagaagcaagtaaaccccagccgtcctccaaacccagaaaccgtgcacgaaaccgtccgaaaaaaacatcaggagaaccattagagaaacacaaacgcccagaggcaaaagacgaagtgaagctagagggcgtttaagaggattcctcctcttcctcctcctcagccttggcgaggtaggcggccttctcctcttcgtagcgcttcttgtcggcggcggccttagcatcgtagggcttgcggtcggtctcgctcagagccttccacttgtcaccgagctgcttgccaacctggcctgtgggggtgttagataagtacaatggagttggggaatcaattcactgaccgaagctgatgccggggttctcctcgcggaccttatcacggttgtcattggcgaagaacatgtaagcggacagaccacgcttgggcgcgttggggtctaagtcaattagtacaagccgttgacgacgaggttacttccatgtcgaacttacccttcttgcggcgctggacgcgcttctcgggggccttgcgggtggtcttggtggtggtctccttaggcatgatgactgtcgaaggttagatgtggtttccgaggattcttggcacaatagataatatgcgggagaaacgaaaggcgcgattgagtcaagtgaaggtttatatgcgcaattgacatgacatttaatgagatcggagtggaggtgggagatgagaagggcagacgcgagtgttggctagacgcgttgcgcgcaaccaaccacttgcgaccgaggcaaaacagagctttgagatgatagggatgagaccaactcacatgaatttgatgatcacaaattaggaatatgttttgaaaagaaaaaggactgtgcgattgcgagttagttgaggtggacaaaaacatagatcgaggtgcagcgcgcgatcgcaaggtcggcgcaaattgggaaaaaaaaagacaggcaatgaggtgaaaataaaggattgcaaggaccaaaagaactgaaaaaaaaagggggtggtggttgtggtggaggaaattcgattgcgaagtgttgatttatagaactcggggtatatgcagtacctttttttgtaaggggagtttttgtatggggagttggtagtgtaggaagatagtaagagaagagaagagtagaggggggagggccgtagtagtagcaaagagaggggggccacagcaagggaaaggcactggtttcgctgactggctgggagaaaacgtatgatcaatacccgtaacttacgccgtccaccatactattcgtcactgatttctggaaatttacgtattatttcccccaggttaccgtcagaatttccatttagatcgtttgctatgatatattcatgtacattccttttttttttttttttttagcaagactttgtgggcggctgtaccgattagaaaattcaatacggcgtccacgggttatgaaacgagaccatcattccggcacttgggacttgtggattgcgctccgtcatattaataaccgcgcaaacgtacaggtacacggtacgcggtaactccatagtggaagtatctgctcggcaagtacctcgtacttgtcattaccgtggagtgtttgccattgatttgatatacatacttcgtacaatatggcttatattgtaacgttatgctaataataaggccgcaatgatgcctacagttgtggcaagtaggctacgatgtatgtcataaagagtccggagaacccctggacgaaggtacaaatagaatcgagcatttccatgtatttaggtcgggcagggtttgttgtgtacaggcatggaatatcatggacttgcttccatagggtatagcgtatagtggctttggtcgcgagtcgcaaggtcatgtgcaggtacatattattattgtacggggtactttgcggttctagaaagacagatcctagtttactacggggtattgtatcattattcccctggtcgatagaataagaattccgaaaacacggtctacttaagctctcggtgtcaatatcattcggttgagaactctgtgtaatgacacaaaccctaatcatcacgcacgcaacgcgtgtctagacgtgtgtacacaacagtgtgagtactcgtaccaagtactcaactatcatcctcaggcaagggcgactgactggtcgctcaatcataatcgttgcgcttccttttagcgtaacctcaattggaaactcggctgggcaggtacttaggaaggggcctgttagacctgttgataaagggcatacgtgttctagaccctaactagcatggatgaatgtggcataatgtggcatagagttatcgctattttcttagtccgagcattatccacgcctagactgataggttacaaagtgagacggtatggcatgggacggcttaaaggttagactccttccttacagagccggatcacaccatcatcacaagctaaatccagcctggatatcttttccaatatgagtagactgcatggatattccatctatggggtaatgtgctccaatccgtcaaatgcctcagattgctcctttaacttgcagataccagactagtacaatattgtagagttggcagacagattaaaagcaaaagtccgtactcgtactgtagacattgtcaagtccaaacgcatagaccacgcatggacattctggtgttccctgaaagaaacccttctttcttacacataccgttgatactgcagtactgtggatgtgtaaggagggctaatccacctgtactccgtaatgtacggagtactctgtacagttccacgccttccgacaggaaagtgtattgtggactccaaattgatatctcatcgctagctaattaaaaagtgatagttatgcaattatccgagcgtagagcccttacttctcagacgcgaccagagtacaccgctgtgtatagccgtcataattgcagtactgatggaacacattgcccaggtgtaataattattatccagtccacattagttattcggctaaaattaccattctctttttttcttcttctagaaacagaaatcaaatgtcccggagacttgggtaatatcgtatagcgcctgtgctccttaagtacatgtacagttgatggtcggaattaagaaatgtagaaaacgggcaagccgcgtcgcaaaaaagaacaaacatcagtcatcactttcatccagcaccaacgcgcgcaacatgtcgtcatcagcccaatttagtccactggcaacaactacagcacttgcgatggacttcatagtttcccactgagctttgcgcgccttgaaatcagtttcagacttgtccaggcgcgataacagctcggggtcttcaagcttctctctccatgatgaatcttctttcgtgagctctagtagctggcgcactagttcctggttttcgcgattgatctggagattctttacttgtaggtttgagagctgcctcatcaccaagtcatgtgccgacgcgaggttctcgtgtgcaagggcaagcacatcgcgacgattcaccagacaaagaatggctctgcgtatctttgttagacttcggtctagtttaagggctcttcatgggtacatacctctcagcaggggttgcagccttcaggtggacagctttgagaataggctcagtcatgaggatggtgcgaacggccttcctcctgactgtataagtagatcgggcctctagaagctcacgttccgcgattgcgagctgttcttcagcatccgcgcccgaatatgattccagttctaatagaacaaaagtgattagaaaggaaaaaaaaaaaattaaggaaaagaaaacaagcatataccttgttcgagaaatgccttttctagctgctgttcctggatctggttgtagagctgcagcaccaaggcctctttatccgatagagtcacgacatcgcgatagtcatctgcagcataatctaatagtgtcacctcaccagattgtaggtgaggcagcgactggccatgttttgcagccatcgatgtagatcccatgaatgcgggcctatctggtgatatgaagatgagaccggaggcggtgggcgagcttccccggccacaggttgcggagcaaccttcaacgtactgaccagcctgaccggggcttcaggactttcattcttttctttctttccttacaggcaggtgtctcctttttgggaaatacttctcacttttctctctactgagcatctaagctcgcctggtgcggaggaaggtaatgtcgttgcacatctacattgctcacaccggggagcatttcctggccgatccagtggcatttgcttcgtatgtctccactatcttcattgctatttatctatgttgatcagatctatctgaactccagctgacgcttgtgcatttctattagtcccgatgctttgaagtcatggatcgttcgaaatacatctattccgccaccacggcagatcttgatgaccgcccggggaaagaatgtcaaaatccaaacgcttgctaccgaggtactatattacgaatatcaatcataacctggaaatcggctaactcataggcaactatcgcagaatgagatctttgtatatgaccgacaatacgtcagtgaaccaggtgacgtcgagtttccggaacgacctcctcctgaaccattccgacccggtagtcccccggctacactgaaagactcgaacgaccttcaggcatggcggaacctatatatggcacggcgcaactgggcgctggacttgtccagccgctgtgggtcgattgataagaacctccgagaacataacgagcgaaccgatgttataaatcgcgcggtgggcgtggccctggagaatctcaagtcgcatgtgggtaacttagagcatcggttccaagaggcgcagacatgggcgaatagccttttagaagagcagcaggccgctttagatggttggcaacgagctctctccacactggataacataccggcacgtaaggatttccctcttcttggacgcccgtccacgcctaaaatggacgaggatcgaccaaccggaacgctgcgcgactttgtcgatgtaggcgaggtccaacgggctggatcagaggcagcaactgtgtcggcggactttgttgctagcgtccatgaaattgaaaaggcaatcggcgacatcgcctcggacactcaacaattagtagaagatgcccttgcctcaaatttcgacggggtggatgggtggctggaagaagtggagactattgcgaagaagatcgagtctgattatgagcatgtcctcggcctgccgaacaaccagaaaacgttggccaatatatcaagacttgcactcagccatacgcaagaccttcttccatcgctagtggagatcagcgtcgagcttcaagctgcgctagagcacgctgtgcaacgccgaggggccgcggagaaagcggccattcagcatatgcgcacgatttcctctcttgagtccagacttgccgacgccaatgcacgaatggtcaatctggacatagggagtaatgcctttgaggttatatactctgtcttccaaatgccaatggtatatgggtcgatccttatcgaatccgtgcggcggcgagaatggagtgagaagattaagactgactccttgacgctggccgaggagatggccattttgagggacgaagagcaacgtcgcagaaaaaagtggttaaagaatatgggggactatatgactgtgactgattccaccacaccgggaatcgaagtcaaccttcaaggtcaggatgaggaatggcccgaagtagcccggaaagagatcgagtattacatcgacgatttaaaaaccactcattccttgaccaacttagcggaagagctcacccagcagctcaaggcgctagatgcaccaactcggcaacaaagacgtcgggccaaagcgttcaaacaaggcagcgtatttgacttgagccggagctctatattacgcgccgatgactccgtccgtagcttacaagaagaaaagacaaagctagaagaaaggatcaaggggtctgacagtcgcgtccgcaaattggaagaccttttgcaccgacagagtcagctcagccggccatcgagcggcactttcggccccgacttccccggttcacctgcatctcctcaccctgatacattctctagacggtcatcaatgtcttcgaggagagtctctgcgactcagtctcccgaagagaaagcacttgtccagcgcattgttacgcttgaagcagagttggcggccgagagagatgcggtccagcgactccataaggaagcccacgccgagcggcaaaccaactccgacaagttccaagaagcccaatccaccaaaaaggatctcataggcaaccttgaagcgcgccagcgtgaatttgaagacgagcgccgatatctggactcagagctaaagaagttcagactccgtactgaggaaatggaagaagagcttgatcgacttatggacagcagagagcatggaaaacaagaacttgacgaccggatgcaccagctcgaagtcgaccttgaacatgctcacgccaattccgccgaggacgcacagaaaatcattgatcttaacgcacagattcaaactcggcaagagcgagaagaaggcctccaggctaagattgataaactcgagcaccaacaaatggagttcgagcaaaagcagcaggaaagttaccaagccctccaagttatcttcatgaacctctcacctgggggtattgtgcctgtcgaaattcccgacctaatcaaagccattgaagttctctccgagggtctgtcgatccacgccaagagtgcggaatcgagtgcatctcaggcaatggccgagagtaaggcccttgaagaacagattgccaaactcgaatcggaggcagaagagcggacgaagagcttcgatgaacgtgaggccgaattgtcgcgactaactacagagctgtcacgcgcgcagtcaaagtcgaatgacttgactagtgaactggacaaagagcgatccaagtacaattccttgcactctcaaattactggagagagtggctccgatgcgctgcgtgaacagatcgccgaagagcaacagaaacaggcagagatgtcgcggaaactggctgaagctgagagtgaagcccgaaatttgaaagatcaggctgcggaatgggagaaaaaatcagggagtccttcggagactgagaaacgggctgtcgcgcggtccgaagctcgaggtactaagtccttcgagctttctagtcagctcttcgcccaggttgagaagctgggtcggatgctcgaacaattggggttcaccatcattcagcaagatggtcagctccttgttcaacgagcttcaaagcttagtgcatcattggccctaggcgaaagcctcgcacagtccggtattgtatccctgaagccggataccgcgctcctagactggatgaaagccgaaagcctggaggatgaagagaaaaaattctcggctttcatggaaagcctagctcagttcgacgtggccctatttggtgatgttgttgtcaaacgcgtcaaggacatcgaactcctagctcgcaaatggcaaaaggaagctcgaggctatcgtgaaaaataccaccgagttcagagcgaggcccatgacaagatcgcctacagatcatttaaagaaggcgatcttgctctcttccttcccacacggaatcaagccattcgctcctgggcagccttcaacgttggcgcgccgcactatttccttcgcgaacaagattcacacaaactacaagctcgagactggcttctcgcccgcatcaccaagatcgaggaacgagttgtagatctgtccaaatcaatgaacggtatcgccccagaccgtcgctccctcggggccgccagcgacgtcacctctctggccgacgagaatccgttcgagctttcagatggcctccgttggtatctcctcgatgctgtagaagagaagcccggtgcgcctgccacaccggggctagcgaagagcacagttgcatcagcgcacgtcgatgccaagggtagcatccgcctcaagcgtgctacggacgagggcgctattgccaaaaccctatctaggagccttgatagccgccgcgagagttcaaattccaagcggggcacgcccgcgccgtcgcagcacgctgcggactccacgaccgatcttgtccgccttgccgaaggtgatgccggcacacagcctcgagaggctgctccgaccttcgacgaggttcgccgtaacctgccctccggcccgtgaaaagtaggacttatttatcttccgacttttccgggtctgttttttatataatttgataccggtactaatcgttttcctttggcttaggatcctgtctctgcatcggctcagccaaacataagtagcaccgcttctttaccctctcggccggcgtctgatcgtcgacacaacggccgatctcgtccgtgggagaaattgtggtctcttgactatcgactcgagggtggcgcaccatagactggttttttatttttatttatttataagctctggcgtactaagacgtggcattgttctttggtttcttttcggttcttcctggacatatacgtgtcccatttgcttttgacattgatttagtccagatacccagcaatgcaatctatacttgaatatattaatctacttgaagtggtatagggcacaagttgccggttgagctttatgaaacgtacgtcaaaatatactcaaacacaaagataatttacatagcaggtaagccgaggttgatgaatgaaaaaaaaaaaaaaaaagaaaagaaaattgaatagttaactagtctcaactggaacccgggtctaatccttccacgccttccatgccacccatgtcatgccaaaattggctgaaatccacgttctcgtcttcaaacatctgcttcgcttgcatcatcgcagaccgttgccgttccacagtgaaaccaccaggccgcgagctctcccattgaattagctcgacccaacgcaggaagagatcctccttgcccatatcggccaacttgtccttgaaggcaaggagttggtcgcgctgaacggagtctttttggctggtgggggtattatcatccccaacacgccagatcaaccaaccgtcagcatcagtgttaaccagcacggcagtgcggaattcatccatcttcacaccatcggttctgcgagtgcgctcaacaagaccatgagcacgaaccatagccgcatagtctaaattccaatcctcgtccacgagcaagtaaccagtcttggcgattcgctcgggagtcaccgcggcgacgatcttatcgcgacgcgcctcgtcgtcgcggatccaccggttgcgctctagctccttgctccaactgcggttactgcggcggacgatgatttctcgctcaaggaaaccgatggcacgacgccagtgcaacggccctctgacgaaattaacaggccacgaccacagcagggacacgaggaagtagtcgacgcatatatttccagtccgccacaggatgattcgtaccgcttctggccacggggtagacgtgtccacagtcatggaatttttgagcccgatcaatgttcccacgagcgctggatacgtactaattcccatgtacacccgtaggccaagtatagcagttactatcaggttgacgataaggggtacggtgaaggtctgtcgtttcagttcctctgctgtggtgtcgatgtgcactaggtatacttcgtccggggagagttgctcgacgaacggttgcaaggcttgcggaactttggtgaatggtgggatcgggcctgaggaggcggagcttggtgtcgaggctccggatgaagatggcgtcttgccgcgacctgaacgccgtgatgattttgccatggcggggttgatagatggatattccactgaattgctggatatgatctgagtttgagtttttctcaaaggcttaattaaaatgtgagtttgctgctttcgtcgaagctcttaaggatgtggcgactaaacgtgtcacatgtcaagataaagtgagggacatttgagcacgacgaggttacaaataatctcctgataaggtcctcagcgtaaatataagtaaagacaagttgaaatggcaagttgtcagtgcttgaagagtcgacgtaatgcggaagaaatccagacggcctaaccacattcgggaatgggagcgtatttacctccgtcatttcttcacggcgcaggagaaccgcgtctttctccttttcccctacctttctacatgtaaatcctctgcaggctgcaaggggtatttcagccatggctctcgatagaaacaatcgagtctcgcaagatagacaaccctcacctttccgacgcgcctcgaaattcgaccatcacgatatacctgcgaaactcccatcaccccctcaagatggtccgcatccacgacacgctattcgcccacgatctctagtcgatgcgtatcgagacgcatcaaaacacgcaatgtccgccacatacgaagaatataactatgtgaccacaccaagcccgcgatcgaagcgacaggcgattaacgcgttatcgccaatatctcagacctctcctcccccccaagaactagaagatgcatataggcgaattgatgaagatgacgccctagccgatctcgtgcgcgactatgactgggagccacaattcagcgcacgccccggaagccgaaatcgccccccgtccccccgagcaaagtacacaaacggcggtcgagcatctgccaatggacgatccatctccgacgctagttttggtgatgacctcggcgatcatcgagcgcgcaagagtagggactataccaaggatgaagagcgcctaaagcgggtcacgggccaacgctcgccggttttcagcagggcgcaggtaggacgggatgccctgacggcagataatctgaggagacgaatggaggataagactgaggtggatcagcagatgctagaggctgacatgaacggtgttccttcgccgaatgtacccagtggttggggtcatcgcgcaggttatcgacaagaatgggagagaaagcctacccagcctagtatctccgaagaggagaaggaaaaagcgcgtcgacgctggtcgccaatgacggaagaaatccaagcccccaggtctacgcatacctcccctcgttctccggcgcgggcactttctgctagaagcgcgcttgaggaacgcactgccaatccgcatatgcaggcaatgcgggaggactacggggaagcgcagtctggcccaaagccgacttcgcctactagcggtggcgagccaattccaaattcccctatcacagtattcaaaaacgcgtcattcgcaaggcccagcctcagcaagcgcgactcccgggatttactacgcaaactctcaaggactgaaacccccaaaattgaacatgtccagactcccgagccactcaaactgtttcaaagcaaagtctatgacaaaacccctcgagtaactggcgcgtggatcgatactcctatgacccagcgggtggctgagaaggtcgagcttcccgaagatctgacgaaagatatcattcctccacgcataacggatgatcctaaggatactgcacctacgaaactcatggaggtcgaatcgaaacccggtgaaccgaagcccgcgcagactagcgaaaaagagcctctttctgaaccactttctggaaagcagtcgaggcccgcgttgccgcgaccccatctacctaaaagtgcattggagacagtcattgaggatgctagctctggcaaagatgtcgaattcggagaagataccatcgagtctcttcaagcatttatggacgggccaggtgaacctaaaatagaggaagacgacgaagcttacgaaaaggccgtcctcgcccagctcgaaaacggcagttcaaaagaaaataatgcaggcaatttggattcattgaatgccaagctcaactctttaatgagacatatcgatgaggtcaagaaagggcttgacggcctggaaaattacgttacacaagacaccgccattgtgtcggaggcaagctccttaaacaagaagagcctccagtcattacacctgcacacaagcgattccggcacaggccgtggtaccactccctctgatggacgggtctacgccgcgatacctctccctcggctgtggacggggagcccacgatcccaacgccttcggccaaccaagctcggctggttcatcattatttcgctctcgtggtatatcatcgaatgtctgatgtgggaccggtatagtcatcccgagatatcagaaagctgcgaaggttactgcctgcagcccgatgcgccttggtatccctgggtaactgtcacgatgttgtggcgctggtcacatctatcgactattttcacgcctatttttgctctctgtgttgctttctctcgactcgtggcgcaattgatgggtctctcggatggctacgtcgacgacgcgccggaacttggaaatatcgttggcgaaatccgcatcaacggaacaccagtcgcgttcccttggctatcagcccccacgcctgagaacattgtgcctcaaccacagcaggtctactatacacagcagcctgtgcaaacgcagcctgtctggtcggttcgggacccgcccccgcagaggtgggacaatgaccagctgttgggggaggatataatggacgatgatgaatatctttagttctcaaggtttcttctaaattccccagagatttgctttgcgcgtttcgctccgaatcatcattttgctcatatgagctggactcgtgtgttatcatgattctaattcgtagtttgagatgctatctaatgtagcgattcattgctataatctctagttaacaaagtaataagtgatatagtcttctggatagccataaacgcccaacacgtgtaagatcgcgcgactggctctccagggctatcgcccatctatcacagaaatggttcgtcacgaggatcattaaaaatacaaatagggtattataaagcaaaaggaaagaagcaaaccatacaaaaccacttacaaccgcgctgtcgcgcgccattgcttctgcaattcgatctctccctccattttccaagcagtcattcgctgcatgagggcctcaacctgctcatcactgacttcacaggccttttcaatcggtatttcctttgtcaactgcagcttgaagcccaaccaggtgaggttcccggttgacacaatccggccagcaacagcatcacggcagaacccagcaaagctctcgaagaaacgatggctagctggcctatccatcatgagtataccgtggcagtgcggcataccctcgaacaattccgcgacgagaggcgcaccggcttggtggacacggcgcgctagaatgagatcttcgtctgtgagaccttcctcgccagtcgagatccagataggcggtgcgttcttccatagatcagccggggtagcgagcggagatactaatgggtggctcagcatgctggcgttgcagtagatgtcagcgcgaggtggggacgtgggccaaacatcgtctggtatgacatggaccggagtagtaaatagagtcttgacagctgggtcgttagggggcgcagccggcgcttcgagataatcgaggtatgcattgccgctggtagatggcatggagcgagacacatcgcaccagggagagatggttgcgacgcctgcgggcagttctataggcacatctttgccgtggaagcggatagtgtgagatgcgcggtcgagggtcaagagtgtttggaggaggaccagtgagaggttcccgccggcggaatccccagcgaatacgatcttgttggctggcacgggtttgtgaagggagcctggaggggggtggaggagtgagaggtatgccgttaaggcgtcgacaagcgcggctgggaatggattttgaggagcaaggcgatatcggacggataagacgggggcgccggtcaagtgggacaggcgtgcgacggggacgcggtggctgcagggatccataaggctttttttttggatgcgttagctatgcgcacggttgtaagagggtcgagcgacactcaccaatacgctcctccgtggaaatacaagatcatcatatcagacggcgattcctggcgcagcttgtggtatttctcctcttctgagagatcgggctccggtgttttctttccaaccccggcgcgataaccggtccattcagcttcgacggcgatagttgcggggatatcgtatgtctcattgccggtcttgaggtcttcaattgcgcgtattaccgcatcgcgcacgtcgacctcgggctgtgggagggtcactttggacacccacatggggcccttcactccagggtcgcgtatgccttgtctctgggttttaccaagtggagcttttgttgacatgaatgagcgaataatggcgacggttaattcggtgcgcatgtcctgtttccccttgacgggggacatttgaatgccatggaggaggacggtcttgaggattagcgggatgcgcaccagcagcaccttcaagagagcgagagtttccctcagcgagctcatagtgcgaaggtggcaactttgaggactggcttttgcgaaataacgaaaagggaggtgggagagaaagacctcaagatcttaaccttggaagatgctaaactggttttagttcctgagtggcgtcagtgccgaggtccgtggatcattggtacccacaagccctaattctgaattgcttcaatgtgtactccgtatgtagtattgatattcttttcgttgatttatgatatgattgatcattatatatatcatgacggctttgctttagtgtacttcatctgacttaccagtaggttgccaagctaccagattatgccggttatgacctgcatcacatgtacctaggtagcattactctgaacatatgatattgcagcattaagctgtggaaaaaaaacgcttataacaaccacaagacttgacatcgcgtggtaaatgggcatacaatgccgtcgtcgtcccttattagagtaccaccccaaccaagtatgtagttctgtggcttcatatccgatgacaacagccgggatatttctaacacgatatcagaacgtgaacgccctcatattcctaggaatatcatattcaatcatacagcattgatctagcagatgtaagaccagaaccaatcggctgccctaatccggacttgtgatagatgactaatcataagcctcaggccaacattttcatgatcttcaactctaaaactaccatttgtttcaggccctttggtttttgatgtcttcactttgcacgcctcaaggcgaagcttctccgcctttgtactgtatgttttactgagcagaatctatcttgtggatgcaatctttcatgtccgctttccccatcgtcccattctcatccccccactcacccactactcaatttgccccatcgcctcgggacgtgttcatggtagtaagtcgggcggacacgactcaataacttgagagatggaggagagtacccttttcggcgacgacttgccgcttccaccggctcgacttttcgaacgattaggtcagttacctggctatacctgggatcagacgatcgaaccgtttcactcgacatacaatcactggcatatctcaggataccgtcatgccctggagccggatgttttaactcctcttgcaaattcctccaatcccgcttcctccggaccgtccagtctcacacgcttctccccgcgcacagaagctcgaccatctgcccgtgccttgcgaagattgagcgttagcgaaaccagcagtgaaatctcattatccaaccaacacagcctggagacagatcaaacatggttaccggtcatcgcacgaatctccacgaacattatccggctcgaacgagagtttcacatgcttaggtcaattgtacaatcgtcagatccggattgcaatcatacaatacgaccagtcgacttgatcaggctacaacccgatgacgggcactcgaagacgctgctggttgcgatttttgagtctccaggccatgataggttgcgagatctggtcacattcggccctgcctcatttgccgcagggtccaaaggcgaagacaacaatgtcacccccagcgagcaggtctccttacaagccttttttgatttcgcaattggagcatgcgattgcttggagattctacactatggcctgaagacagtgcacggcgaaatcagaggcgatgcgttccatttttgtgcagagaccggtgcagtgaagctcgcgaacaccggaaacggtgctaggtcgtttgataacgttctcagcgagggctggtcctccgtttcgcgcgagcttggggccaagtacaagctgcaatttattgccccagagcagactggaaggatgcctacagagccagatagccgcactgatatttatgcgctgggcctctttttctggtccatgctggttggaagactaccatttgaaggaaccgatcctgttgatgtggtacaaaatgtactaggcaagagattggtaccagtatctgggaaacgaatggatgttccagatgctctctcggctgtgatccaaaaaatgacccaaaaggtggttcatgatcgctaccacacaatctcatctgtgaagagagacttgaccaatattgctaaattgctcggtgatggtgacagtgaagcattgagcaatttccaagtcgcgcaaggagacgtgtcttcctttttcactctcccaacgtacatgttcggacggcaagaagaatatgacaagattatcagtatcatcgaaaaggtgaataagcgtcaggcggctgccttggctaaatctggaacccaaagtcccggtactacgcacgctctcacgtcggcttcgtctctctctgaaagccgtatcgaaagcctcgagtttgcttctgtctctagcgattctggctccttccatatgccccctcgatcttcttcgaacgtcaccagttatcatatcgcacaggtaaacagtcatgaatctgtgccaggtagtgagacgtcgttctccactcagaagcatacaattgtccccgaggtgtatagtcaaagcccaggagcagcttccagcagagtcaagagcccatcgcattctcggtcttcccataacacagaccgcgatagtcaccactccatcggtcctcccagccaacaatcaacaaaccataccgttagtcaaccgggatcactgcattccttgaataaaccgaagaatagtgggaagtctcgccgcaacgagcgttgtgaagtgattacaattagcggtccctctgggattggaaaaacggaccttttaaatcggatacagccaacagttcgcaagatcggatgcatagcaatcactcgtcttgaccgagccaaacgtgtcccatttgaacctttcgcaaaactattggccagtcttttgcgccaaatcttctccgagcgcgatgtcaccacagattatcacaacagtgttagaatagccctgcgaccaatgtggcctactctgcacagagttttggatcttcccgatcagctgatgtcccctggcgcaaaatacagaccagctgaaaaggccaataactttctcatgccaactaagggtgagccatccaagcatgtcaacatccccgggctggatcaagggcagacttctcaagatttctttttggcaaatgccgcctcgaagaatatgcggctcacggagacattccttgagatattgcgaacgctgtgtcatttcaaactcatcactatttgccttgatgatctcgaacatgcagatgacgaaactttggacttggtaatgaaaattatcaaagcaaagctaccatgtgtcctcatactgtcaagccgcaaggaagagattccatctgcccaggtgaggtctttatttgtggaagatttaccggcgatcacgcgaatcgtacttgaccccctcgaagagcagcatgtcatggaacttgtagcagcgacaatgcaccagaaacccgatcaaacattgacgccactatgtgcggtcgttcaggagaagagccgaggaaatcccttctacgttcgggtaatgcttgaaacttgttacagaacaaactgtatttggtattcatggaaggactcaaagtggctattcgacctcgaccgaatatttacggagtttgtggctcctgtctatggcgaagggcttggacttggatttctcaccaagcgtcttcaggatattccccaagccgctcgatcaatcatggtctggggagctcttctgggcagcccgttctctttttctctggtacaaaagctcttgacaagtgaatttctgtattcgagcaatgacgacgactattatgatctcacatcaccccaagatatcacacttatcagacaatcagaaggtgatatagttgttgggttgcagtttttggttcaagcaaacctcttaaacacgggaaggaccgacgatgagtttaggtgaggcatctatgtttactactagcaaaaactcttactgattctcctaggttcggcaatgaacgacttgcacaggctgctctttctttgaacgagagtcgaaatgtagagaagatgcatttcatcgtttcacaagtgcttatgaaatattaccatgaccatcgcagtcgctattcgatggctcatcatgtggcacttgcgtcgcggactatcaagtctcgtgtcagcagacgccttgaatatcgtcagatcttatgggatgccgggcaaaccgctttccagtctggcgcgcggccctctgcactttggtacttccgccattgcatcgctttacttcaggatgatatgtggaatgatctcaaacccgacgtttattacgatgaaaccatgcggctatttatcacgacctcggaaatgtcatcctctcaaggtcacaatgatgatgccctccagttgatcaacgaggtgtttgttcatggcaaggacgccttaagcaagtcgagagcctggaccattaaggccaaaatcttcgctcagataggcgatcaccacagctcgatggattcacttctcacctgccttgatgagcttggtgtgcatcttcgtcaacctacaacgtatgaggagtgcgacgctgcctatcttcgtctcaagtcctatctcgagactgccgacctgagctctattgcccaaaagccagtttccaaggacccaactatagtgactatcggcgcagtcatggcggaggcgatgacagtcacgtactgggacgatgcattgacattctatcgaatggcgcttgaagtgatgaacattcatattttcaagggtggattcacacagatcgcaataggttgttcccatcttgccatgatcgcattaggtcgctttaaagatatcgaatttggcacaagacttagcgacctttccctagaactgctcgagctctgccccgaattgtcgactcagagcagaggctcgatcgttcataatctctacgtcagccatttacgtgttcccatggcatcaacactaccggccttggaagcttctctcgaggcttctttctcgatgggtgacccgtatcttaccctgatcagcatctcatcaatggccatgactcgattgtacctaggccaagacatggcacagctagaagctttctgtgtggagacccctgccgaaattcccaagtggcaccaagatacccgcggtggggctagtctcattgcagtccagcaagtttcacgtgccctgcaaggcaagaccgaattccgatctgccgatggtatcatgtcagacgccaatcacaacacctctgactatatgatgcatctggatgttcactccagtaacgctgacaggccccgtgacatctactggggtcttgccatggttccactgttcctgttcggtcaccacaccagagcaatccaagtaggtactcaacttttgttcaccaggcacaggctctggtctgcacgtgtgtcctacgtgatttgtttctatctggcagcctcaatcctcacttttcataatgacaatccctcccaaggatacctcgacgacaagatggacgcactcatggaatacaaggccgagatcgattttgctcgagatgcatcggaaacaaattatggcatgtgggctctaattctagaggccctgatcgccgaggttcggaatgatcatagcgctgccatccagggcttcgagtctgcaatcgaccactgtcaaatccatggttggccccttgaggaagccttggccctcgagctgcagggtgagtttttggttagacgcggagcaaagagggcggctcgtgctgtaattcaagatgccatcgcttcatggagctccattggcgccagtggcaaatcatcgcagctcgctgagaaacatgaatggttactcaagacggccacatcgtccaaaactgtggacgttggctgtcagactgttgattcacttcttgagatcagccgtgatgttgtgcaagaagagtgtatggtcccccagcagatggaagaggatgagaggagacaacaatggatcgagcaaaacggtgttgctgctggggaacgatctctagacatatcaagtgtcgggttagacattattgacttatccagtattctggagtccagtcaagtcatgtcatctgagcttcaaattgacaagcttttcacgaaaatgcttgagatcatcttggagtcttgcaacggttctgatttcgccatcattgctactgacttcgatgataacaatggctttgcaattgccgcagcaggtgattctgaaaagggccagaaatcattcccaggtggtctccctttctcggaaatggaagatcgaatggccttgcatatctcggactatgtcatgcgcacaaaggaagaagttcttgttcacaacgttctcgaagatgaacgattctcaaacgtcagcgagacctacctggcaaatttccccgcgggtcggtctgttatcgcattgccagtcgtgcaaggagatcgccttctcggcgtcattcatctggaaggaaaaccaaattggttcacgcagcgaaacgttgtggtcctgcatttgctttgcaaccaaattggtatttcgttgtccaacgcgttgctcttccgtgaaattcgcaaggtcagcgccaagaatgcttccatgattgaatctcaaaagcgtgcattggcattggcacgtgaggctgaacagaaggcaaagaatgcggaggccgaagccaagcacaacgtgaagttaaaggaagacgcagcaagggccaagtcgattttccttgccaacatttcccatgatctgcgtactcctatgaacggcgtgattgggttgtcggagctcctcaagggcacttaccttgacactgagcaagatgaatacgtcgaatcaattcgtgtgtgtgctgataccttgctcaccctcatcaacgacattctcgatttctcgaagctcgaggccggaaaaatgaagatctccacggttccactcaatttaaagcaaactatatcagaagtcatccgggctttgcgatacacacatcgtgacagaggcctagaaaccatcgagaatcttgataaggtaccaccagagctcgttgttcttggcgaccctgttcgtctccaccagattttcatgaacctcctcagcaacagttacaagttcacccctgccggatcagttacggttaaagcaagggttgcgcgtgagggtaaaggtcgggttcgccttgaatgttctgtcaccgacaccggtatcggtattccagacgaacagaaagctcgccttttccgaccattttcacaggccgatgcatccacggaaagatcatatggcggtagtggccttggcctgtcaatctgcaaagctataattgaagatgttctcggtggagctatctggcttgaatcgaaatctggagttggaacgaccgtgacattccacttggtcttcaacaaagcaccaaagaagacggcggtcaagactgcatggtcacaagatctggaaaatgcagacaaagaactacgtcggtcctcagctcgagatctcacgcaaatccctcgtgaccagattcgagtgtgcattgccgaagacaatccaatcaaccagaagatcgccgtgaaattcgtcaccggacttggtctccagtgtaacgcatacagcgacggcaaacaagctgtcgatgctctgcgtgcaagctccaaagaaggcaatccattccacgtggtcctcatggacgtgatgatgcccactcttgacggatataacgcgacccgcgagctgcgccgggatcccgatccaaatgtaaatgaagtgctagtcatcgccatgactgcaagtgccatcgaaggcgatcgcgagaaatgcctagaggctggcatgaacaattatctccctaaaccggtccgctcgccgattttgagcgaattattggacaggtatctcgccccaatgccgccatcctatcccaagtctcgtcttgctatccgagaaaagcgttcaaaagcaagtattgacggcagcgccggcacacccaccagttactcctcttcggcttcagatgagccgaagccgttgtcactggaaaagaaatgagtccatgcattttaaatttatacccaagttcgcaaagatagaagttaggcgtcatttgggtcgatgagtttatctctctttgactttttgttttttgcctcgtcgttcaatgcattggtatttcctcctttggtatttcttgtggactttattttatgataatcatgcacctttgtttcccgctcataatcatggtcaatggcatacttcattggatatgatccgatacatattctgaattggacatttgaacataatgcattatttacgtgtagaacatcagctatatacataattctcatgatatcagacaaaagcctaagcgcgacgaccaaagacgcggaaacgcttgacaccgccatcaggaacaagagtcagcttgacgtggctgaacacccgagtatcctcaccaccagcagtgagatcatcggacccaaagacatgctcggtgtctgcctggcagcgcttatcacccttgacgatctcaacccagttggcatcatcagccgagggcacaccttcaccagcagtgccagcaaccagaccgtgcacgcgcacagcgcgagggaagtttccacggaaatccttggtgtcaacaacaaccttggagaccgagccaggaaggcccagcttagcaataacccaatcgacgtgaccagcagcgcgcgagcgagcagtctcccatccgtcacccatatccttgccacgaccaggaagcagaatgttagatgagggtgtatagtgctcgtcggaggcagcaagagtcacaccgccattgagagcagacgagagctcttcaacgggggcagaggcagaggcagccggggcgggagggggaatggcgtggccgtagaggcggagacgggcgaagccaccgtcagggtacatcagaagacggaagtgggtgtagggggattggctgatctcgtcggataacttccatgcgcggcgctgggagggaccgcaaggtgaagcgggtagtagtgtcttccagccggcgaagctggggtctgcaatctgggcatctgtaatgccgctaccttccggtgcgtaagtagcttgtagctcggccttctcgccgtagttgccgacgaagaatgcggtgtctacttcgacgccgtggatagaggctgcggcaacgcccagcttgatcacggcccagtcgtagggatccgggttatggcggcgggtctcccagccatcgtaccaggcaccggtatgaatgaagacgccggggcgtgagatggcgggagtgggagttaggaggttatcaactgaagcgaagtagtcgtttgagcaggccaggaccttgctgtttaggttgcacgaggccaagttggtagtgtgtgcgaacacctggtcgatatcggcggcggcgacctgcattttgggtagagatttatggattatgcgtttcaatgaggtgtttaattgagaagtcgaagacgagggtgagtgtatacttaaatagcagagtggggggttatcgataagagccttgcccctcgaaatgcatttccattactcgatagtctccattcctcttcggtcttcgtctcatcagagccaatcagagcctatctttctcgatattccgttggagtaccgatatttggcgctaagtccagatccaattccggtttgagacctttcggagttgatttcggagttcgatcgttgatccactacatcaaacgccatatcggaggtctccgatgggcgccgttatctgaatggaagtctctcattgactagaaattatagtcacagaatccatagaaaccggaggaatggaagatgttcaatttgcgcctactgcgtctaccgtggcagtgagaagttgaaagaactttcctccgcgacctgcacagagagcccggagttcatcggaattcaacaattcggccaatgagacttgcaattggttctgctgtgctcagtcaccgacgacaataggacaatagccgccctgcttgtaaattagcagacggaagcaaaaggaacgggaatcaagtcaactgccatcgtgtacagggttctacaatgacacagctaccaccgattcccatatatcccgaacatctttgttcaaaggggacacccgagtcattttacttcgttactgttgcaatcttgaccgacctacttgtgtgacactcaacgaattctccctcgagtcagagattcagggttaaaatcaggtaatcaatttattgccttcagacaaagcccacaaataggcaagacggatcacgtgctatgaaacatgaaatattacccaggtcattcccaggctatgagagcagatatcagagttaaaaattgacaaagtatttcagcacaagcacatcaaaataagctatgaagcttctagaccaacgccagcaatgccttcgtatcattcaatatgatgggcgcaaacagcaaaagaaaaggaaaaagaagagaagaaaagacatttttgtcgctatcccttcccagtggtcttcgttgcagcattctccagggccgtatatctccactcgtactgtgccattgctcttttgtcgcttgcagaacggccttcgttcttgccactcaaatcctttgtgccctgcatctgtatttcccatcccttgaggattcgagcctgggcttccgcgatcgaagtcaggtttgagttttgtgaagccattcgttcgtcaatcgtggcatggtacgacaatttggcgcggaagagggccatttcgcattcgtcgtacttgatccctttcgcctcgggcaccatgttgtcttgtgtactcttcggaggcatctcggactggaccacgagagaaaaagggaaagagggaaatattgtcggtgcagcagataaactacttttatagccgtgttttggtaatggaatgtgttgggagtttggataagtaaagacaacggttttatgttcaaaggaacgaagtatgtatatctgtccaaacacaaagcgaatgattcaagagcgatgtcacgcctagaatacacctgaagcaaacatagaaatatagtggcgaaagggaaggttccaaattaaagagctgtaggggaaaatgcaagagaaatctcgatcaaatatatcatgaccaggtcgtgttcaccgtcactgtcgaaaggaaacatggaccctccaatacccgacatgacggatgtatcacactcaattcccccaacgctgcgcagaaaaggggcatggctacggtcaaacccggaaagagaaggagatcaaaggacacatgcacatacacacataagagacttctaacaagcccaacggtttcttcacgccaaaaatggttatttgtgcctctgaaaccgtactcgaagtaggccctacccatcccgtgttgagcggcgatgacccgtttgcttttggcaacagtgccatctgtctcgtgatgagaagccgagccaatcgatctaagttgccgccttacctggagcgttgggtgcaggagccatggtaacaccatgtttgaatcgtgcatgactttaggaattttgctagaacggtcgagcatcaatcggcagatgcagtcccgtctcggtccgtatggccgtgcgcacatctctgtgtatcaggatctgtagattggaagacatccgtgtctttttcagttgtactccgtacatttacatgttctttgatggcccaatggctatatgataggtggctgtttgtaccaaacaatccgacccggatcttttcagctgagagacaatcgaaaaagcctaccgcttctataccgatgccacgagggtcaattagaggcaagcaaccggattacacgcggaatagagttgatgtagcctgcccgtcatttccaccctgtcgtctctctcctccattatctttcagaagatctcaatatggaccattgttcgggtttcaatgtagagaagatgggaagagaaaccccctcgaggtcattggtatcaatgcagtgtttggcccagactataaataattagcaattcgcaagcaccattggcttttctactctacaatcagagacatacatacatcttcagtacaaaggataaaaaagaaaaatgcaaggccccatgaacccgttgaactatattcttcagccacgtagtctcttttgtcccttttctggcttgcgtcaccatccaattcttccaaggataaccatattagggctgcagagcacccacaccggctcatttgtgacacttgagaccgcaggaagcccgttgaccatttattttattttcttaacaaagcacatgatattatttgaaggctgaacccattgatcaggatagcctcccttctagagtgggctaaaaaagggacggagtgcaaaagggtcataactcggtacctgatttgtttgtacaacgctgcaggctgaaatttaggggacctatgggccgtgattgcattctggactggtggcgatgcatctcggagaaaagaaaagtattccgtgaggtatcccaacgggaaatgggccagaccgagaaaggtctgggcacttagggctcgtgagatcatctgatatcaaccaattgtagatctacaccacggacattgaagccaacactatccttttgggagtcggtaaggatacaaagcatctcaaagctcatgtttctggtgtctcatgtacgtttgagacgatagagggcggaaattgtgtaacggaacaagcacccctccggcgggtaggcacagggttatatcgggtccgacgcgtttcaaccgttccacattggtgcctttgtcttgatctatgtgtaatattgagagaggtctgaagtttgtttagattcgtcattgattgatttcaagatgaccagctctaaattttcactctaaatccagagagcttggagctagaacaaagacgggaaaggcacatcaaaatatattatccctttaataataaaaatggcttccctactactgaatgtttatcgattagcactgccctcctcattccggctcgccgccgctctcactttcttggccttctgaatatccaacgacatcttcactgggtggactcccggggtctcaaacaccgtgttgatctcctccagagacaaacggctagtctctgggaagaataaccacgacaagacgagttggatcgagttatacacgatgtagacgacccaaatcttataccccactttttggataccgacaccaattccgtaagtctgcgcggctccggcacctccttgaataagaccgtaaagacccattcccttggcacgaaggggtaaagagagaatttcaatggggtacaggttgtgcatggttgcaacaaatgtcgctgagaaggtctggtataggaaaatccagagaatggtgagcgcagccgctgctgtagtggcatggagactgtactgccacgaagtgatcgtcgtggccgtttggaaaacaatcatgctgataagacccacaaagatcatggttcgtctgcggaacttatcgactataagcgcgccagcggccgtaaagacgaaatagactgcggtggtaccgatgttgataccgagtagctgcttctcgctcttgatgccgagttgttgtaacgaaggaaccatctaaaaaggtattagtgactgagttaaggtggcctctgatctaaacacccacatagtatgtgataataccacctccattccattgctggaagagcgagtataaaaacaaaaccagcagtcggaaacgggccgccttggtgaagaaaacccgatagtcccaggcggccctgtagcccgtctggtcgttctcgagagattcctcaatctgtctcaccacaatgtcgacaattggctcatgtatgtcggtgctagtggtgtggtacttggcgatgacttccttggccttctgacgattgcccctcaagatataataacggggcgactcgggagttataaggtatattcccagacagacaatagtggggaataaagcctcaagaatgagaggaacacgccaggagttgttgccaggcaactcggtcagtccaatcatggcaccaagcatagcaagactaccgacctggaagcatgcgccaaaaaagcccaccataacaccacgcaggtgaataggcgagatctcgccaatatactgagagcttgacatgagcgaagtgccaaagcccatgaagaatcggccggccatgaatattggcaggttcgttgcgaggccttgcatgagagatgcaaagatgacaatggcatttccggtaaaattgattccacgacgaccgatcacgtccgccaaacccataaagggtgctccacagacgacaccaatctgcatcagagcattgatcaagccatatgtgccaccactgctcccaaaaccgaagtaaccgtgccattgatccaaagcattaataccgctgatgacaccccagtcgataccaaagccagcttggttacaaccatgaataaacatgatgaggcccagacggactccggtccacgatcggaggctcagagaatcctcagacagcttccacaggtcctcctctgtcactcgtgccagaacaatctcctcaatatgttcccgattctcgcccttgcccagcttagcctccgcatagccagcatctgaggccattgttgcgttttggggaactcgattgaaggaacttgaaagagtatggatatgatcggcccagtatggggttgagaacccttgagctatcaaattcgagccaattttgtggatatgccggggtattattgcttcggtgagtcgatcgcgaagccaggggcgacaaagtaatggtcggcatccataatgttgctaagcgacctatttcgccacggagaagacatgagcttcgccagattaacttgtggcgtgatgtaactgctagaatagatagtgattggtgagtgatggatgtcacgttgtacattttgtacgccgactcctgaaaagcctctcctcgccatgtaccctagggatttcccaccagtgagacacgagtgcgggggagactagcatcaagttggcaggagtatcgcttaaacattttcgcaatgttagtctggagtggtcgcatcgaccgcagatcacaaggacgatgataatctgggggagacatttagcctgaaatccggggaacggccggggaaagagttagatccggcgcttgttttcccgaatcctttgcacttggcaagtcgtatcggcttcttgactatcccactagctcctagctcttttgacttatccgattcagcgtctttcagcatgttctattcaaaagtggcggctgacggaccgaactgccgtcttgttctccagagctagtccatattgatacatccacccaacacagaccagaccagacccattgaaaatcattgaacatgtccgaactatggtaccaacagcctgcggaagactggaattccgccctgcctgtcgggaatgggcgcctaggcgccatggtgtatggacgcaccgacaccgaaatgctacagctcaatgaggattcagtgtggtatggaggaccccaagatcgcaatccacaagacgcgctcaagtacttgccgcgcctgagagaggctatacgtgcggaaaaccatgtcgaagccgaaaagatcgccaagctggcgtttttcgctaacccgatcagccagcggaactatgagccgctgggaaacctgtttttggatttgggacatgatcctagccgtgttacaggctatcggcgctcactggatctcgaaagtgctacagcacatgtcggctatgagtaccaaggtgttcgcttcaaacgtgaagtcttcgccagctacccggatgatgtgcttgcaatcagattgcgctcgtcgagcaaggctgagttcgtcgttcgcttgacgcgtatgagtgacttggaatatgaaacaaatgagtggcttgacgatgtcagtgctagcagagactccattaccatgcatgtcacgcctgggggcaggaacagtaatcgagcgtgctgcgtcgtgtcagttcgttgctatggtgatgagagtacaattaccaagattggaaataatctggttgtaaactctggtgataccctgctggtcattgcggcgcagactacatttcgacacaaagacattgatcaaagaaccaagcaagatgcagagaatgccttgggtctctcgttggaggatctccgctcccgtcatgtttccgactaccagtctttgtacgaccgaatgggattacaacttgggccgagctctcctgaggtcccaaccgaccaacgtctgaaatattctcgggatccagggctcatagcactctatcacaactataatcgctatctcctgatatcatgtagtcgggatgtacacaaatcgcttcctgcaaacctccagggtatctggaacccatccttccatccggcatggggctccaggttcactactaatgtcaatctccaaatgaactactggtctgcgaatgtgtgtaacctctcggaatgtgagcttcctctgtttcaattactagagcgcatggttgagcctggcaaagccacagctcggatcatgtacgggtgtcggggatggacagcccattccaacactgatatatgggccgatacagctcccgttgatcgatggatgccggcaagtatctggccgctcggtggtgcgtggctctgctaccacatttgggaccatttccaatatacatgcgatgaagagttccttcgtcggatgtttcccaccctgcgtgggtgcgtggagtttctcctcgacttcctgatccaagacaccaatggcgtatatcttgtcactagtccgtctgcttctccagaaaactcattctacgattccaaaggggaaaagggcacattgtgcgaaggatcaacaatcgatatccaaatcattgctgctattctggatgccttcgaatcatgcgcaaagagacttggtctcgaggatgcccttcttccatcagtccaagctacaaagtcccgccttccgccaatgaagatttcccctgcagggtatctacaggaatgggccgctgactatgccgaggtcgaatccggacaccgtcacatgtcccatctatgggccctataccccgggaatgcaatcacaccttcacgaacccctcagctggcagaagcgtgcggggaagttatacgtcgacgcgcagaacatggtggcggccatactggctggagtcgtgcgtggctgctcaacctgcacgcacgcttacttgaagccgaagaatgcagtgggcatctagacttgcttttgtcacggtctacttggcccaatctactagatagccaccctccattccagattgatggaaactttggtggtggggctggcattatcgaaatgctggtccaatcccatgagcctggggtaattcgcatccttccagcgtgtccgagaggctggactggatccatccggggagtgcgggcacgcggtgggtttgagttgaaatttaatttcaagaatggccgtgttgtaggtgaagtgactatatattcggagcgtggagagactgtagttgttcacttcaatgagttacaagtagagattactggtggtggtgagcataagatctaaacatgatagatgtgtcaatcaatagatgtcaattgccaattatatgaaaaagacatgcttattcttcaatatcttaaggtacttccgtactccaggtgttggcctcttccccaccgtcgcctatacccacttcgtctaacccctgcacttcctaaaccgtcacggagcaaatacccgcatctcccagtctcggggtaaattgaagagaacaatagcactttatccggatcttcttttgtgggcctcttcgatgagagctctaagctaagaaaataaattatcaacttgttcataattccgccagtcctaacataggcaacacagcaagatggatttgaactcagtgcaagatctcaaggacgtgctccgacccgacttcttccatggctacgccacagcagcagcccaaatagaaggcgcctggaacaaggacggcaaaggcgtgtccatatgggatacattcggccacacgccagacaaaatcgcagatggaagcacagccgacgacgctgtccgagcttacgatttttatcgtgaagatgtagcgctcatgaaatcctacggcgtaaacgcctaccgcttctccctatcctggccccgtatcatccccctcggcggccgcgacgaccccgtcaacgagcaaggtatcaaattctactccgatcttatcgacgaactcctccgcaatggaatcacccccttcataaccttattccactgggatatcccccaggccttggaagatcggtacggcggcatgctgaatcaggacgcctacacgccggactttatgcactatgcccgcgtctgcttcgagcgctttggcgaccgcgtcaaacactggatcacctacaacgagccgggcgtctataccctcgccgggtatgcagcgggcgtgcacgcgccgggcagatcgtccttccgtgagcgcaatgccgatggcgactcgtctaccgagccgttcaccgtcgcgcacactgagctcgtctcgcacggccatgtcgtgcgcttgtaccgggaagagttccagccccagcagaagggaagcattggtattaccctgcatggcaattggtccgaggcgtgggatgaagaggacccgcgcgaccaagaggctgcagagcgtgcgcgcgagtttgagatcgcttggtttgcggatccgttgtacaaaacgggtgattatcctgcctcgatgcaggcgcagcttggtgatcggttgccgaggttcacggaggaggaatcgaagcttgtgtttgggagctcggatttttatggcatgaatagctacacgactttcttcgtgaagcatacgacatctccgcctgacattaatgaccacaagggaaatgtggaaatctgcgatgagaataagcaaggtgtgtctcgtggagaggaaagtgataccccgtggctgcgggccgcgcccgggggattcaggaagttgttgaactggatctataaacgttatcagatgcctatttatgtcactgaaaacggtaccaccgccaagggtgagactgcacccatgcctgaggttcttaatgacgagttccgcatcaagttcttcgagggttatgtcggcaatgcgttggcgcgggctgtgaaggaagacggagttgatatccggtcttactttgcctggacattcactgataactggggtaagtagtggctggtttcttcgcatgaatatggaattggctaatactttcagaatgggccgctgggtatgcggatcgcttcggttctacatttatcgatttcgagtccgaagaaaagactcggtatcccaagcagtctgcctattatctggacaagttgttcaagcatctgattaaagacgcatagaatattgggagacagacaaatagttaacataaatgaagtgtctgtcatatatatatttgcggtaaacgcagcaacaccaccacctatataggcaatagatatatatcgtaagacaagtcatacatcggggtggactggagattactgtgtcaccaccaacatcctgtataacaccatcgcgtaaagcttctatttgttggaatctcgaattatagccagttagggcaagtcattgcgatccttatcagctagaccccgaattactccaactgaggggaactccgcctcggctgttgatattcctcttaaatagctggagatagccctgatagccttgactttgactatctgtatagttacctgcattgtgcatactcaacatgcagcccaaagatgagccaatcaagctgaagctccagggatctcctcgagaagtaaattctgccaatattaacatctgcatatgataactaagaacctcaactgactcaattaaattagatcgggctacagcatggccgagggttacgggaccaaatccacagccagatatctatctacgatgccatgttccagcatacctcaaatctagcctggaaagatgtgcgcgaagtcgcaactgaatttcagcccacacttcagaacctaacgcctgatctgtttacggagatggagggtatcgcagagggcgccgggttagatgtgcttgacataattgcgctgaactgccgaagcgagatagcgctaggacgattctccgatggctgcacggcactaagctggaagaaaagcgaggcgacgcgagtgctcgcgcagaattgggactggacgcagactgtcaagaagaatctagcgatggtatcgattgagcaggttggaaaacccactatctatatggttaccgaggtcagtattcctgtataggtctatattctgacatgtaattaactattctcaggcaggaatcgttggcaagataggattcaataccagcggcgttggaacttgtctcaatgcaatccgcgccaaaccgatgattagcagcaagatcccgatccacgttgcgcttcggttgtgtttggaaagtacttctgtcgacaacgccgtgaagaccatcgagtctctgggtggtgtcgcctctgctcagcatatcctttgtgcagacagtaccaaagccctagggcttgagctgtcgccagttggagacaaacatatctccgaggatgcatcggggattatcggccataccaatcatttccttgagaaccgctatgtgaatgagccaccgtggctgtccgggtcacctatccggctcaagcggctaggagagttgacgcaggagttaatacagggtggtgtccagggcgacactattaccccggctgtgttgcgagaatatgtcttctctgatacgtataaccagcctcagtcaatatgttgtcaggaggacccatcgcgtcatatctcaaataggagtagtactttgttcaacattattatgaacttggacctggagaatctcggcgcagaggtggtctttggccggattgggtctggagaggaagggcctgtgttgacaatgccttggtgaatgaatatcatgaaagaccgctggataggactttgtatctgtgtcttagatcataaagaagatgacaagtctttgtgctggaatccttttattagatatcaatattcatctgtgtttagaatacaaagaatatgaggatagtctttgttacattgtttctctttgaccatggactcaaccataaaagaggcctcatataccaccttcagatgtctcatcatccaccagctactcattcttcaggcaatcggctcaaaggtcataggcccaggtaagcctcataatccactctattcaataccatctagttcctaccagagtcatgtccggtcgcagtttccacggtacgtacgaagaagagcgccgctacttcatgaccacactgcacgctcagattgacattctcaaggacaactacaagggaagccgacatatcgttatcaagtctttgaatcttctccttctgcgagtcgaaggtctgcgaatgtccggacaagctcattttgaccacgataactctagttggacagtcaaatgtaacaggctctatgaacgggtgcagtatttcagggatactcttgtcaaggaccggaacagcacccgcaaagttgccaatgaaatcgagagtatgatgatatttttggacttttgtgtccccgcggatattcaatacaggattatgccagatcgaggggatcgaagtggtgccccatcgcccgagcctatgtgttgattgtatttagatcaatgaagtgattcagttggaattcgttgccgataatggtatatgtagtatcatagtaaaatggcgtacttatgagatttgtaatataggccaagcctagatatttcttttgccgaatcagctttgcaatggaatccctctcactggcgttttcagctcccggagatatgcggaccctatctcaaacgtcatcgaaagtgacgatcacgccaatttgtgatttgtagagaacattgagctgaaaaaacgcaataaacgcaaggatcattggccaccgccctcaatccctttctttgggtaatcttttcgccttttcttatgagcatctcctataactgccatggcctcggcaacaggaatccctcaagctcacccagtgacaattgaatcgcgagaggatgagcctctattgggccgtccaggcgatgtcacacaaaaggccgaggaggccatttatcggaaccttttcacaggtgagcgtgaaagctttcgatcgaaacccacgactgactccaaaatcaggaacagcaagtgttgcgcaagcagggatttggattgtaagagcattatgacctattcgaaaagatcagagaactaatgaacaaaacagctagccgcgttggtctggcaaggtgtcttagcccaacccctctcgctgttcaccccgcatccagtaagtatccatgtcgctgaacaaaatatcccaaagacattgactggaagacattcagctactcggcagctctgcccttcttcttcaagtccaagcagctctgattttgcaaccaaccgccaccccgcaacaaaagcgtacgggtactcgcatccactactcctttcaactgctcagcgtggtgctttttgtatctgcttttgttattatcgaggttaacaagggctctcatccgcactttgtttctcctcacggtattctgggtctagtcacttacatcgctatcgtgctccaagccgtggtcggtgtcatccagtactttgcgcccgttaccgtactcggtagtgtggacgccgggaagcgcatttataagtaccatcgctggagcggttatgttttgctactgctggagatggcgactatcgtggcggcgacgcagaccacctacaacttgatggcgattcatattcctctttggggtgtcgtggttgctgccatttttatcctcgctggagtcggtgcgaggattaagaagcataaattggggctgtaagatcgggattgagacgggatctgagagtactgcagactatttatgaagcgaatgtatgaagtttccgatgcaaatggagcaccagcctggggcagccgggtatgtagatcgtctatagccgtggaccagattcatgtgagtatccaaatctcgcatgatcatactcgttgcagtgtggcatgaatgagaaccgaacacaaacatttgcaaacgaatcttctcaggtatgctcatctcaagcctgataggcagtgtttaattcagactgccactcggggcttcctttggctcttcgttgatgagggtgatgtctcgttgcatctgtcatacattttcgtgatattcccacatgtatgtagacaagatactgacttcaaattaaacctcattgatgatactctggatattttgtcatacgttgtaaaaaacatgcagatcctcccaaaagggttaaggcgggagatccaccactacacattgcccgttctcttctcttcttccttcccaactccaatggcactcacttcatacgtctgcttcaattgcaggcattcatatggattgaaagcatcgctgcgtaatttttcctccgcccgacgcaatcgagacatcttgcgacccgggacagctccgaagccgacgccggacgtcaaacacatccgccaaaatgccgacctctacgcacagaactgcgtagatcgcaactatgcaggtcacgccgggtatccgtcgaagattgagcaattatcggaggaggctaaacagcttgattacgacctgaagacccctcgatcccgtatcaagcaactagaaaagaccatcgccaagctacacattgcgactcggcaagaaacagatgggaaacccaatgagaagggcctgagtccaagcgaggagctggctgcactcaagtcagaagctcagcgcctaaaagacgattcgcagtccatgaccgaacgcaaaacaacctgcaccgaagagatcaaccgactagccctctccctcccaaacctctcctccccattcacacccatcggacacgaccccactctcgtacaatacatcaactttaacccggaagagccccccgcctggaccagcctatcccaaaccgagctccaagcccggtcgcacgtcacaatcggcacagagctcaacctcctcgacttcgccagctcagccacaacaacagggtggggctggtacttcctgataaacgaaggcgcaatgctggaacaagcactcgtccagtacgccttgagcacagcccgacgccgaggctggaaaaccgtcgcaccgccctcgatcgtctactcctacatcgccgaagcatgcgggttccagccacgcgaccagcacaacgagcagcagatctggtccatcgaacagaacgaacgcgacagaaacaccaagccccaacgctcgctcaccggcacggccgagatccccctagctgccatgtacgccggccgcgacttcaacccctccgagctaccgatcagactcgtcggcgcgagccgctgctaccgcgcggaggcgggctcccggggtgtcgacacgaagggcctgtaccgcgtgcacgagttcaccaaggtcgagctgttcggctgggcggatagcgtggacggagccgtcccgagctcggagggtatgttcaacgagctgctggatatgcagaaggagatcctgacggcgctgcatctgccctgtcgcgtgctggagatgccaactggggatttgggggccagcgcgacgcgcaagcaggatatcgaggcgctcttcccgtctcgtctgcgcgcggcgtcgggtggtactgctacaccagtggatcctaagattcatcatctggagtcggcttggggtgaggttacctctgcttctatttgcacggattaccagagtcgtcggttggcgactcgggtgcgtggcagtggcgctaaggagtcaaggttcccgcacaccgttaatgggactgctatggctgttccgcgtgtgttggctgcgatcttggagaatgggtgggatgctgagcggggtgttgttgttattcctgaggttctgcggccttggatggatgggatggagagtattggtcggagctaagctgaggaattgatctcgctctcgtagagacactgtatattatgtattttttatgaaaatggtggacatatatttatttcattccgctctctttaatataaggatacgtggttatcttcatggatcttgcattgtattaactgtgatcttttggtatatctaaaaacatagtagacacaaaaatgaggtcttcaaagacctccaacgcctgccttgttggggatagagcacaggattaataaaaacagaacagaccaaagcagggtagagcaactcatgacttcgtgaacacatatcagaaacaaggaaacaacataaatcaagtaaacatcacatcattgcgaaatcacagagacagggcacagagacaggggtacaatctggtctctttcgtcagacaataccagcagcctgagaagtcaaggtgcagataaaataaacaaaaagaaataaaacgccctcaaaaactccaagtagagcagaatatccaaagagatgataattagcgcaatttgtaaggcaaataaacagatcccaagaagttgccaggctcatttccatggtagatctatatcttcgacacgggtgcatgtcagatacggcaatcctgtcggagtattctcacgaggaccagcggtgccagtggttggttgatctgggcttttcagctccaattcgagaaaatttcgcatcagcggcttgacgatatcgcgtgccagccgtttcatctcgtccatcttgcgctcgaagcgcttgagagtctcgcgcgtgtaaagcgagccagaggatgatgtaggatggagcttgagaaagcgctttagctcttcatggggcaggtatgcctgcgtggaagaggagccgatcaatctatagatgcgcgcggacgggtctggggaggttgttggtcgagacgggcttgtcgggtgtgacgctgatgcggtaggttgaacgggaccatcgcttgggcccgtgtttttaaggatgggagctggcggtggcgtagtgctttctatcagccattggcggaataaacacacggcgagccagtccaggtatgcgtttgagggaccgacacgttcaccacgcgaggtggttagggataggcgtaggagcttggattcaacgcgagctttaagctcgtcgagatcttctactttgtcttcgatcaggtctaggagtgagtctggtagaggcgcgtaggagccgtttcgcaaactcggtagggcagcgggccactggccgacaacgtggatcaaggcttcggaaaaaatcacccggctgcgggcgagatatcccagcttcaggtagctgggtggatatttggcgatctgtttgaacagacgagatccaaaaccgagtaagtggtggtccacgcgggaccctgtcaccggaagcgcgtcatacatatccgccaatgcaaggagggatttgcactccgtatatgccgaggcgatattgacactgttgataatgggcgggtgattgtagaatattcgtagtaaattgtcatagtcacgtattaagggatcgaccgcaacggcgtgctctccattctgcggcaggtgcgctaccgactgcatccctgccaggttcgccatggatcgaaagaagcctgcctgggcgtttgacggcttggtcatagttgggggaaatgcagtttggtcgccactgaacatggggtcataggttggttgctgtttcagcacgcggcattagcattgttcgcagatgggagtatgcgacgcgccggcgcaaggtgtaccttttggacaaggattgcctcttcatcctctgcgcgattctcccagtcaagttcataccgccagcgtctctttcctcctggtcgcgtcgagagtccaccgttatcagatggtgccagtgttgacccgttcgagaaatcatcatcctcactcagtcgcgacagcgtcccctccggcttggatggacacagagccatttgccgcgaccagttttcattagtgctcgcctcgaagaaacccgaacattgtgataatattaatttgtggaggagatagcgcctttcctgcgatccggcgcggatcacgacctcggtgtcacctgtgtacgtgaagatggggaaatcgttcgaggatggatgcgaggagctgccatggtgcgagcgaccggaacggtgtcgtctgtttgagggacgcgatattagggaagccgtactttgggcggttgtgcgatcaacgatctgtgcttgggacaccatttctggggatttgttgacatatgcgaaccgggggtgctcaacacctatcagcataagagagcgtcatccgaggccgaggatgaaaattggagactgtcgattattgtataacagggaataaataaagagagaagaataaaggaaagagatagttagaggtagaggttaaggaagagaacggagtagttccaaaggctttccccgccgccaaaagaagtaaaaagagtatagaaggactaacaaagtcatacactgttatttaaggagtgagatagataaaatagatcctgcaaaggtccccgtttctatcacaatccagttacaactaaataaacacgaaactaaaatattaatagcagatctatggatgtgcgctgccgcaagcagctgaattcgataggcagagggccaattaccaatgcgacaagttatagcagaagacgatgaaaacataaatagtttctcgttatagcttcatatttatgttactttgatatgaatactacatcagacatgctattataaaatactactacctactaagtaacatcggggcttttcatttcttctttgcctcctccactttctccccttttagcccgtctccagtctggcctttttttgcctctcttctctttcttttcgttcaaatcccctcagcttcttctccggccttcttcggtgcttttgagttgctttttggttcgaaaaatcaatcaggtggactcgggagtatacggtctgacaccctatacgaacgctacttttattgcgacgctctgttccacttcctcgacgcccaacccccgcgatcccctccaaaaatctggccctggacacgtcttctcgggacagcttctatagctgtcccgatctgtcatcactgcagataacgtcagtgtctgcagattttggcagcgacgtgagaaccgacccgtctccttcgcgctgtccttccttcgagtctgccccacacaagaaacgctccaaagccaaagcagtctcgaggacagcgcgcggtgtcatcggtaaagtccgggcattccagcgtatcgctgccgctaaaatggcgcatccgactattaagatcgacaccagcgtccaggcgaccaagcgcgggctacccgagaatgacgacgcgggcctcgatatactcggtgcgaatcaggacaaccccaagctggaagctggaaataccgaggatgttccaccgtttctatgtcaatctgtctcgggtgagtgaggggtgcatcaacgtctatcggagaatactgcacgtggaatgtgactgaccgcttccttatgcagagatccatgacaagtttgaagatctggaatggatacagacctcacgtttcaccgagggtacactgtccaatgatgtcttgcatccttgggctatagaggcagacccgaaggtgaaagagaggaaccggtatattaatgtccaggcctgggcaaattgtcggatccatctgcgggtggccgagggcgagtgtgattttatcaacgcgtctccgatcatcctggaagacacggtgacacgagaaagaaggaaatacatagcgacccaggtaggttgcgtgtttgtcgtaaatattttatggttcacttaccattaatcagggccccaaacttggacatctcgcggccttctggcacatggtcttccatgaaagccaggatgtcggcgttattgtgatgcttactcaaacttttgaggccggccgggaaaagtgcgctcaatacttcccattggatacggagcaggcttcgatggtactattggcggatgagtcggacgttctcttcgatgagagtgagcagacagaacccggtatcttgggtaaggttaccttgttagaatcaaccttcgacgctaaatcacgatctgaaatccgtaaactcgaattggccatcggttcggagtcaaagattgtctggcatttccttttcgctggctgggccgattactccaaacccgaaggcagtgatcgccaagcccttcttaacttgatcaagttgtcagcctcaaaatcgggcccggataacccgcgaatcgtgcattgcagcgcaggagttggtcggactggaacttttatcgcgcttgaccatttgctgtgcgagttagaggcagggcatctgttggatatggaacatccagatgccgaccctgttttcgacactgtcgatcagatgcggcagcagcggatgatgatggtctacaacgagatgcagatgcagtttatctacgaagtcctccgagaacaaacagatcggaagctgggcaagattacagactggaacacagaatcacccgacggcagcgaagaacggtctgcgaaaatggccaagctcaatgaccagacagattacctgccaacctccaagccggagttggaagctgtccatactcatacgccgaccagaagtcggtccgccacaccggagctttctgatcccgataattaatgacgcccgctcaatctccaccgttcttcctaactgtgagcatggactatggacgagaggtttatgtttatgttgcattcattcatggcatccggtgtttacttggttctgaattatgccttgttccaaaccccctgctatgtattttttttctttttgttgaaatacccccgttttgttactttgatcattatcttggatgtagttatactgcttattgagtagcactgtcagtctcgccctagggtcactgtatattagccaattggtgaaagtgtatgctttgccgactgctctgagacattctactttcgccgagtaaacatttccatcataggtttttcgggatcagattcgttattggcattgttaaggctatgtagcacctcgcacgaattcctagtaaatccacaactatacaatcctttggaaataattagaaattctttgcacccttcgcatatcaccgaccatgtgcttgcccatagaagatcatccatcccatcacggcataatataacaataaatagaacaataaaacaaaatcgcagcactgctgagcacaaatatcgagattggtatcataccgacgtgagaagaagacatgaaatccatcatcataagaacagggagtatagcgaaacaagatcagaatacagcgcatatatactcctttccgaagcacaaagtacacgcctcgctccggtagaagtatcttcaatcaatgcgttttgccgcagcagggattgcgaccgactgaccaccgacagagccagcctcatgataactgggaggagcagccactcgctcggaacccggcgcttcttccgtatcccaattctcaactgcattctcgtcccaattatcgacttcctgctcaaggctcataacaccggattcctgtgggcccatcacttctgagtcgcgacgggggtccccggagacgccaccgagctcgacgtcctcggtgccctcctcggtgagcccataccggctttgtcggcggcgttccatcatgcgccggtggtaccaattgcaaattccgatggcgccgacactaccgacaacattggcgacaatatcgaatatatcaaagtctcgaccatttggaaggaaaccctgcacaacttcagagccaacacccagccctaatgtgcagaccacgagggtcacgtgtagcgtgcgccgacgggtagtgtccaggacccagtaaaacgttacggaaagtaggaaaaaggtgacaaggtggaggaacttgtcattgggttgaagctttgttggtatcgtcgaagatgtgctgtgtggaagaagaccgatgtagccggctaagaaaagcaggaagatgaaggcacctgaagcggttagttaggtgatcgccggaaccagaatggtaagtcagtaaagcttacctgcgaaagggtatcgaatgcgcatggtggtcgagtaataagtaagtgacggagaagtgagaagcagatttggctgggtctctttttctggtgaaggtgattgtccagtcttagttgagaaagccgtcaaatgtggaggagtttggccgcagctgatgccttgtgcgtcatatgcggagcactggggacgttcaacaacaaagcagaggcgaaagcttatacagaaacacagaatccacggtaaactcaacacaagaccaatgaggaatgatagattgaaacagctcaagatgtgaacaatagcgattgatcgcgagtcggaatagtaacaatgagacaagatctgccggttgactccgccttcatgtcctgtacttcatccccgtccagagaaacttccctatgaagctcccccggaccttgttcatcaaacctctccgccacgctatcattttttgccattttgacatcttgggtcgattgtaccggcggcgttttctatctctatgccttttgtcccttctccgacccctgtgtcgcgtccgatcggcccgtaatcctaatcgcggagaatcgagtctcgcccgccccagaaacggggttttggagcgagcatgtcgctcggccacaacgcctggcctccgggcaacattcggcccccagatgatctccaggagtctccccgcccagtcaatggcttggtaaagactttatctggctcccggacaccccaaatacgcggctctgttggcgccgaagcgccgaaccccagttcgatatccgaagccgatatcgcgcccgaggaggatccgcgcattgctcaattccgagaattgtatcgccgcagtgaggcgaaaataaatgcgctgttttctggacgatattcgggcgataaccctgcggctggggaagctactgagtcgtccgaagcccaacccgaacgcgtcgataatgcgcctcccccttccaccgccccacggaagtctgcccgaaaactcgacgacgatgattacgatgactatgacgatgatgatgacgaagatgaggaaatggacaatgctgttgaatcacctctggaaaccaagtccgccgctgcatctcaggagcctagtggtgccgcgccattagcacgtcgtcccagtacctcgatatccgccattgcggatgggcttaaagaacccaagaaagagacaatggaggatctccggaaacaactcgaggaagacaaaaaagcaacggaggaggctgccagaaggagtttccacactctattctacacccttgagaatgatagggatgccatgcttgatcaacaacgattggaagagtcagaaagacaagtcgaggcagagatatccggccaggctaacatgggtgccaacaatgtctcgggggcttccaatggctacagttccttgagtaacaccaacctcggcgcttccagtttgactctgaagaaccttatcgcacgaattgacaagaagcgagaccgggtgcaggcatccgatgctgagttgcggagcttgctgagtgaagttcgcaagaatcgcagcaaatgggcaaacgaagacaaggtcggccaggaagagctctatgaagctgcggaaaaggttcttagtgagctcaaagctatgacagaacattcaactgcttttttgactcgtgttaacaaacgcgatgcgccggactatcatacgagtaagcggccctttcaccgcaatgatttatttcatctactaactttttactagtcatcaagcacccgatggatcttggatcaatgaccaaaaagctgaaaggcttgcagtataggtccaaacaagacttcgctgatgacctcaccctcatttgggcgaattgcctgaaatacaacaccaacaccgaacatcctctacggaagcacgccctttacatgcggaaggagaccgagaagcttgtccctctcattccagatattgtcatccgagatcgtgccgaagttgaggccgaagaacgtcgactccagctggccgacaacgacggcgctgaggagagtgacgatgaacccatcatgtcttcgcgaggtagaaaggcacccggcaagaagtcttccaagaaaggaacagccccttctcgtaatactcccagtccttccagggctccaagcactcagccaactgcgccagctcgcgcagattcggacgctaccggtgaagctagtcaaaatggatttttcacaccacctcctgcatctaacacttcgtctgaccccgctggtctaggggcgatagctacaacgagccaggatgattcgatggacatcgacggtccaagtatgtcgacaactgcgctcagtgccatgtcagtttccggtggcgttgaaccggaagaccccgagtacaaagtgtggaagcaagtcaccaagagagacagagcgcgcgttgcggcggaacgacatcgtctcctccggggggacaagcttaactccgaagaacccgctttactcagaagtaaagctggcatgcgccggtggcttcgacatcagaaacaagctactatcgaaacagacaagtctcgcgatggggattctcaagccatggaactcgaggccgcaggcgagagcctcgcagaaggtattgaggtggaagaggatcagatgctgccttattattatgatgtcatgtctggtgttcctgatcttcctgaccggctactctggaaggaggacgcgcaaggcaatgttgttgatgcctctgaagagttccttcggatgcttccaacaggtcaattcatccaacccgatagcaagttgacccgcaagatgaactcgaatatgcggcagatgcaagaaactcgcaagatctgctcgaagattggcatcgtcaagcagatgcagcttcaatctcaggtaagcgagccccatactctactatgaccccagctctctgctaacttcttttctagatgtaccaaaatcaattccaaaaatatcagcctgagccatttctcgagcaagatatcgaaccacatgtcatgaatgacaacggccctgtcattgccccctgggtctgtagggcagcattgcagcgctcggtcgctaaagttttctatcacactggctttgaggaataccagccatctgctcttgaggcggttaccgatattgccgctgactttttccataagctggggtccaccttcaagtcttatatggaaacaccaaaggttcctaccaccgagtcacatgaagctacgccttcagccgctgaatggaaacctgcttacactcgttccgaaattgttctgcacaccttgtctaccgtggggattcatatagatgaactagagtcatatatcaaggacgatgtagatcgtctaggaagcaagctcgccactgctcatgatcgactcaggtcactcctgacagaactccttcgacccgctcttgagggcggcgaagatggctcaaacgcatttgccgatggcagtgaacagttcgtcggtggtgacttcgctgaagatattgatgaagatttcttcggtttcaaggaactgggcttggatcgggagtttggcctctccactcttagtgtacccttgcatttgcttcaaaaccggatgttcaatgcggccaatccgcaaaacacgagtgtttcaccgaccgttactcttttcgctcctccacccccatatggacgcatctcaacagacaacttttctcaccaaattggactcctgcatgagttcttcaagggcaagcttgacgcaaacggtgatgaacctcttgtggaggacctagagctcccccccaagcagcgacccatggggatcaaaccccgtctcccagcctctggcaaaatccccatgtctagtcacctgggccttacatccagtccgcataaacgagccgctcaagcgatggcatccaaatctggcggcgcagagccaagtaagaagaaggccaagaagaacattggggtggccatcgaaatgcccaacttccaacccgatggtgaaggcgaccaagctactggtgacccggccacaaattccaatatgaagaccgaagaaaccggtctcgttgatggcactggcgaatccatgaccaacggagcgtgatgtataacttccgaggtcaggtaggtctatggttgactacgaaaatggccatatcctttccttcacttcctttccttctcttgagtcgcatgctttactttcgcatacctacctgcatttttattctgatcttcaatatctgcgacccatgtctcacgacacggctagacagggttgtgtgtccccttgccacgatacaattgacgaacagggagcgcgcagtaatatgagccagtattcattatttgaccattgcaggattgtatctttggatcctcaaactttcagcgacacataatccagcccttgtattctaccagtttttcttggttttcctttcccttctctatccttggctgaacggcagagtggacaattcccctttcagtctttgtatcataacatcccttgatgggatttcatttatagacggaatgtctattcagattcattcaatttagacctgttctcctatgacttaaatcttgtaggtgccagctcaagcaaagatcaatgggtagctcgacctgtcaatcatagatgtgacaagaagtgaggacaggagctgttccaagatgatgactccaccgaagctttatggaatgaatattttagacttgttagagatgtccaagaaaggaaagaaagcaagtcaatccaccaagttctattccacaatggaagactactttttctgtatcagaggttactatccaacctctaactacttgaagtgtgttaaataatggcataggagaatgaagtattttgggcaaaggggtttttttttgtattttctgggttaacaacatgataaagtaaagaaatatgaaagtatttcgtcatgaactggagatcaacctcggtatacaatcggccaagttgtttcggaaaacaaccgcccattaaaaccaggtccagatcatgcagtgtacatagacgataaaatagaaaacgaaagtccaccaagataaaagagaaaaaggaaatggaaaacgtaggcccattcggaaatgcatcgaagagcgacatcacagaagcaatgccgacgatattccgttcgagcaataacgtaagaaaaagaagagtaataggaaatcagttcgcagatagagaaagccgagtcatgagatgcctcgggagggatggcggacaagagtgaatctcgttcccaaccatagaaatgtggcaagttgaattagatgtaccacatacccagggccagcctgtttaaggtgccttcaatgggaagcaatctcttggctcggggttccttgggcttcgggtttgtcattttcacctccgggccactctgggggccagaggtaataggaacatcctcgtggtggcgagcacgaaccgaaatcaagtgggcatagtagattgctgggtgtacagacacagaggttgtcgagcggatgtactggtagcaatggtcattgatcataccctcaaggtcattgggcttgagacccatctcatccaacaggacatggtaatggactgggcggggagttccttgcagagcaatgtgtgtgtagagcaggaagtcccagtcatgtgggctagtaacatcccgatcaataagagtgcccggcaaaggagctccgtgggagtctgcggctgcgcgattcttggggtcagggaacgctcgaagatggtggcgcttgttggcaaccacaacacacatcttgcctgcccagactggctgaccacatgcatgtgcaattgcaaagcggattgcagggacctcctctgaaagaattctccggtattcggacgcagaaacaccgtcacggaaatagtagacatactcaggagccttgccgcccccaacagtcgctttccactcagcaaccatggggtgcaggatgtactcgatcactttatcccggataacctcaactcgatctccattagtctcgcatccacccatgtagcgagttgcagtggagtttgccgaaaccgacatggctgccaacgacggggtccacacacccatcattggatgagtgacgtctgcaccaatgatcatggagcctgggcgtagaccttgactctttgacttggggacagcccgagcagtgactccaccaagctttgcattcaccttcatgagaacatttgcgtggtattgaggtctattgctgatgcagtgtgcagattggagcacttgagagggggtgccgtaccggcagtcggaagacttcttgagacgaagatagacccaggagtccttgtcgggaacgatgaagaccatgagctgtggctcactcttgttctgcgctgcgatcgcatcgtacagctttttgacactcatgccaacgtcttcgctcaatcctttgacaaccggtcggccagtcacatcaccacccatgctcttgtacatcttgacaaactggtcgacccagttgagggtttggtcatggctgattgactttcgatgtccggaaaagaagccaacaccccaagcctggagggccttttcattgggtttgtaaaacttcttaccgcggagatcccaacttcccgcatgctgcgggttgtgcttgcggttgcccccgaactgaatctcaggactcggaagcaggcgagcctttgttttgatcatgtggtcactgatcttcataccgtaaagcttcaggatcgggtcctccttgtgctggagaagttccttggactggcgagcattggccaaacgcttcggaggcctggttgcacaccattggatcatctgcgccgcctgcatatcggtaagtttgtagcggtatctctgaaggcctttgatgactaggaattcggctgggtaatgaacgtcttccttcaccatctcgaccaagagcatattgggatattcgaggcggatgttgtaccgtttcatgaagtaatcttgaagatgcatccgagtagacgtcccagtagccttgtcgtgatagctaatgtaaaactcattgggctttgcgtgaatcaggcccttgacaatgaagcttttcatcttgaaaggacaaccctcgtagttgggtgccactcgaagaccttgaattctcttgttcacctgtgcgaagtacctcgattccttcgtaccgccaaattcgtcgcgggttgactgtaggttcctgaccagggtcgacttatcgttccacccgttcacattcatcatgtaccccataagactaatacgagaaaagaagacgcaatgagcgacatcaacattgaggatcagaccttgctataagtaaatgtcagtataccaatcttgggttcgaatcaatggattgagccttactggagttggcttaattgcctggtagattcctcggtaaacggaagcacccatgttggcgagcggctggtaaaactcctgcttcagctcctcgtcgtctccaagcttgtcgaagaagaaggcccgcttgattgcggcgaactgtttggtgggccattcacggagcaaatgatcaaggaagcctatcattatcagcctgatgaatcataaacagaggaagatgcggaataagggagcacttactcagagattcaatcacgagttgatccagatcatggcgattctgcaaccaggagttgatcactgacagattgatcttcctcttttgcatgacggacattctgaaagtaggactcgtcttgtactgattcttagtaagagtcttgacatcccgggtaaattcactcctgaagtcaataatctcattccagtcatcgaagttgcgtagcgacctgcaacacaggttagaaaatatataacagcaattcgatacattgcacttaccagcagattcttccaccatcccagataccatcagggatgtgtgcctttcgagtctcactgttccagcactttctcaggatccgtctgtcggtctcgttctggtctccgtggagaacattgatctaaaaattgatgagcgaagaatggcattagatggagggggaaaaacactcacctcgtactggtagacggccttgtccgggaaagaagtgatcgggtacgcgttcatcataacctcaatctctttgccggaagtgttgtaaccaatccgacgctggatttgagtctcctccggtgcagactagacaaaaaggttagtaaaatccatcaaccacagagctattgggaatgacttacagaagcaggcatgattttgaatcgatgccaaggaatgtcaatgttcttgcagccatcccatacaaccgtcatgtaatcttcatggtgctcaaccttctcaaggtccagtctgtgttgttcaaaaacagccactttcacgccttctcttgcaaggcggacgtagtttgccctttcttccgcggtccagttttccggaaattctggaggggtctggactcgacggatgggagagtcactgctactagaaccagtgctcttgggccgtttgtactcgcccgcatcagggtcatagttggttcgacgcatccaagcagtactttcttcttctttcttgcgccgtgcgtcatcttccaatttggccttgtggtcacgcagctcttggatctggcgcggatccagaggctttgccgcaggggtagaaaggcgcagaggaagacccctagtttgacgggaggatgaagaggagggaggaggctttgaagacgtattcatagcagcagtaggaggagggcggtgcccggaaagagacctctcctcctctttgccctctttcgagggtggcttcatggcctttttcggagccatgatggacgttgctcctattaatcgacctttgttagtcgctgttctagttcacgtctgaaattgcctgcaatggatcatagatgtaaagcgaccaagtaagatggatagatcaaagtgaggtggtactgctcagcgatatcaagtgaagtagaaaccagtcgctttcattgcacttggatacagtgtaggagaggccagagtgtaaaaaggatgatcacttacaaagtcaaggattgcagtgagccaaggatgatgattggaaaagagggaaaagagaatatggaggggagcaagaagaagagaaattgaaatggaggattcgtgggatcactgggagagaactgcgttcaacgttaacaggggctcacaggaagagaaatgcgttaatacgtttaacgttaaagtggcaaatgtaccttggaagtatgcagatgatggcaggaatccaagctactaaagacgaagtaaagaagagtgatggagaaggaagaagaagaaagaaagtagaaatcggcgaaggggtggttttatagaaaggttagggcaagcataaagagcagatgtattccctttaaggtatgaattgatattgtatagcggttgcctttttgaccggaaattatatgtataacctgttcaatggtaggagcaagccatagagatgcctaatatagtataatatcattcgcaatcacaaatgcagtcaaagtccgcgctacgtgacgatcaggtaattgtttatactagtgtttgcctaacaaaataagatattcaagactcagatatctcgcacttctagttaaaaacagaactgcggtcaaagtccgtgctaaatgataatatggtacttgcttatactaaggtttgcctaacaagatgaggtatctagtgcttagatatctcgcacttctagttagagatagaactatagttgaagtccgccatataaccataaggtacttaattatgctagggtttgcttaaaaaagtcatgtacctagtactcagatatctcgcacttttattcagaaataaaggatacagccacccatagatcagaccctcctgtctgaatctttagtaccgccttcctaattagttgcgaccaagactggtttacatagtaaaatgagatgcattttgatcagaaaaaaacgtatattctacctcacccctatgggatttaacccttgccgatgaagaagctgattataaagcaagatatgacaggatttaattaggggtttgcatacaaattttaggtatctgctgtcttgctcctatcaagaggagtttgatataaaagcggtgtaaaagttggaaggcggtataggccaagtattggtaggtgcctagcccaattaggaaggcgatacttgaatttcagacagtaggtcaatacccaaaagatatctcgttcttaaaagttgaaaagggatatttcaatcagaaagaaagaataaagaaagaattacaactgttgtcaaagcccgcgctacgtaacgataaggtacttgtttgtactagggttggtctaccaatattaagtaccctagtatttcgatacctcgcacttctggctgatatgtcaaaaaagacatcacgcacttacagtcaaaagacatagaaattgatcaaaagaaaaaaccataaatgctgtcaaagcccgcgctacgtgacgataaggtacttgcttatactagggtttggcaagcaatatcaagtaccctaatacttagacgactcacatctttgattactatcccaaaaccgctattcaaggctcaagatcagaaaacttgccccatttccgccgcatccttaggctgcactggtctaatacaattattcgtcaataaatctcttcataactacatggtcgcaatacaaagggcattcaatctgaatttctttagaatatcacatagacgaagtatacgagttctccatggacctggcgactcatcataacatctcttccgatgctactaggattcatcacaatcatggccatggaggaaccataataaggctacaaggccacaaccgtccttgctagggctctaggcctactttaaggagatggtgcattctacctagacacaaggatacatacagttgtgggcgtggtagtctacatatcgcttgatagccggtctcttggtggcattcctttgctaggagccattcattctccgcatggtattggataaggcacacttccttgttctggctgtcggacaggtcgaacaggatctccccacagtcgacaaattgttccgagatagggctagacagctgacagctagtcagaatgcaaacggactgaaggtacaaccctccaatcgggtccctctagctgtcaacttctgtctagtagaagtgtatagtgtaaatttcttgaagtagcccacgctttattccgacttgatctctatatcactatatggtctatttgaacaacaaatgatcaggtaccttttgtatgtgtatcccatagaaaaggtacatgtgcattagactagtttttgcgttcgacccgtgaaacccaaaactccacttcggcgtttggaagcgttggaccgagaactccgtaccattgtcctgataaattggggattagtggcttttttgtacaggcaccaagcacttcaatgtgtagaagatatttacaatgttcgttattttatagcgacctgacatatccaagtgggtttctagatcttaagataagacaagaacagccgatatgcaatctttgtagaaacaccgaatacagcaaactgagtataacttacgatggtggagaatgcagtgacagctgaccaatggcacaatgaaaacttttctacacgcacaactgctctgtcgtaggcaaacacctccatcctttttatcctcaaaccccggtgataactgtagtacactatgccgccaaagaaagcagtagaagcgccgacgaacaatgtcgtcgccttcgggcgcgtcaagtccaacctcaagatgggctgtgtcggcctaccgaacgtgggcaagagttcgctgttcaacctcatgacggagcagaacgctgcggcagaaaattacccattctgcaccatcgagccaaatgaagcccgttgcatcgttcccgatccaagatatgtatgtttttgccttttctcgatttctgtgtgcgtttttccacgtgatggatcttacccttcccgggagaggctctttccatttttggtcacttcaagtacgatgaacccctggctaatggaagataggacttcttgtgcaagatctggaacccgcccagcaagtacccggcctatttgcaggttacggacattgcggggttgatcaagggagccagtgagggagccgggttgggaaatgcattcttgagtcatattcaggctgtggatggcatgtaccacattgtccggtgcgttcgtggcgggaacttgagaaatgaagcagctacttactattacacagcgcattcgataacgatgaggttcttcatgtggatgactctgttgatcctgtccgcgacttaggtaagcatttatccctgtccaggtgatgcaggagaaatagacgctgatggtgctgcgcacagatactattcagagcgagctgtgtaagaaggatttggatattctcgccaaagctaagattgccgaagaggcaattgtgcggaaggctggaggaaaattcaagatgctgccgctgttcgacgagaccactgctaaaatcaaggaggtaagtcacgatttctcttcgaagagatgtgtagtttgctaactccttgtagctcttggaacaggataagcctgttagagatggagagtggacgactccggaaatcgagttgatcaacgagaaggtttgtccaattctaatactcccgagatcagtgacaatgctgacaatatcaagttacgtcttatcactaccaagccggtaatctacctcatcaacctgacaatgaaggactacatccgccagaagtgcaagtacctgcccaagatcgcggagtgggtcaaggcccacggcggccaaggcagtgatatcatccccttctccgtcgagtttgaggagaagctgtggtccctaaaggatgacaagccagcgctagacgccttcatggccgatattaaggttcagagccgcttgggcaagatcactaccgagggtatgtccccagtatttgcctcacatattcaatactaacagtcatggcaggcttcactaagctcggactgcaatactactttaccgccggcgagaaagagatccgctgctggccgatcaagcagggaacactcgctccacaagcagctggtgttatccacggcgactttgagcgcggtttcatcaaggccgaagtcgtggcgtaccaagacttccatgacctctgcaacggcgagaagtcgatgggaccaatcaaggctgctggaaagtacagacaggagggcaagacttacgtcgtcaaagatggcgatattgtacatttccagttcaatgttgcaccgccgaagaagaagtagagactgttcggaaatgtcatttgcctattattatcgctggaaatatggtctttactgttcctattgagctgttttatcgggcaaggtcttgatcctactacttggctttaaattgcatttagatagataccatggattcgaaagttaaaatggcttcaattttccagcatgttagaccctataggattagcaagtacgccgaattcggctttattggagaaattatatattctgtatacggcggatctgtgaattactgtatgtggttagttttgcctcattggtgccgtcacgtaactgcaaatgttagtacccactgtacaaaacccaatgcgaagatccattagtctatattagggctagaaatggatcatcgagatccctgtatcagtatcaatacagtgacttactataattaaaatacgttgccctgtcttgtggctgaactggcgatatactgctcccggatacctacaaagaagcagagagccgaggattatgtcaaattcatggttatatggaagaccgatgtgtgggatgtctgcccagggactttctgttttccccaccatcacatcacctcactggatgcccgacatatcatcagccttcatcttctcacattctttctcccactccccatacgtccgaaacaagtactcctgcttgtccggatggttacggtagtatgtttcatgattgatctcacagacaccgtcctccttcccctcgtggtcgatgcagaaggcccgattacatagaagacatagctgggttgggaggttgtctttcaggtgtggttttctcaatcgcatcctgtcatggacgtggcaggatccagcactataggtttggttctgaggagtttgtcagcctactgaattaaaatagaggttggtgcgaggtggagaaacggaccattctgtaatgttcgatggaggttgtgttgataggttttaaaggcaggatctcgaaggagcgagcaatggaagatagaaataagggtctcaaattgggtactgttgcattgcatgacctcgtaataactagacgtgggctgcagatcttggcattgtactaattcctaaggaaatcattcttcctgatggaaagaaaatgtctcatttgttactgtcaggcggtttcctgaaacgaacgaagtgcgagaaagggttctagcatggctggagtaatgcctcgtggtccgcaacctgaaattaggcggtgctttgacgctgccaatcattcgtttatcggtacgagtctttaagggtaacagagaatacgttatttgtgatcgtaatcgcgaatggatccggggatatttgcaagggagtggattaggagtcgatatgatgctggatgaccaggaccaagaatttcccatccttgagctctaacaaaatccatcttgagttgaacgagaatagcaaccggatttcaatttgacagtgttatatactatagcattacgatagctttccaatgaagacatgttcattttatcgacacgacagccaagactaaaggcagtggcttaccaatgatactctatatcacgagacagcgaaggcccggtgatgggtgagggcgagattctatcaagcgtaggttaatatttgccatctcagagccgacggaggaggcaggtgtttcagtgcattgacgattgctgattttcaaagactcttctcttgatgaaatatcgctgcaattcaatagtacagaaaagctgcgtccatcgaaatggcttggggtgtcaagtccccagaaattttccataaatagcccgggtggtctagtggtatgattcgcgcttagggttcacccaaagcattaatgcgcgaggtccccggttcaatcccgggctcgggcccattcttttttttcctcttctttcttactagttcattgcaacttttgttattatcaccagcagtcttgaatagccaaccctagcaacaagacaaattatcatgccaattaccggggaagtgctcgaggccaccgttctcggtcacgcgatcaacaacgtgtccgaacagacaccacgcgcggttttcaaatccatctgcgcgaaaaaacgacgaagcccgcgtagaagccgagagtcgactggtggcgatagtctccgatactgaagagagccctggcaacaataagagaccggtaccacgctacgcgtcttgtgtcaattgtaagaaggaattcgatgtcacaactaatacggaggaaaactgtccaagtgcgactgcccagaatggagattgaatttccagtatgctcaaagaaattaggctggcactttgtgtattcggcttgttttcagctgcatatatcactccttttgtgttggatatcagacatgtatcattccactgaactgaacatgacttgctttgagacaaaagtctcatgatgaacagtttccaattgtaatgtctagtcaatgcaccttccttgcaagtgttcaatgtaaacaatgtaaacattacggattgggaaggtgccatgtgacattgacattgacattgacagggaaggagcgagggacctgtcgcacttgaggaaggcacgtgggttggggtataaaaggccccccccccccaactcttttctcttcttcttctcttcttcctctccccatctctttgaccaccatctctccgtagcctccacgagacagcgtcgacagagggtcccgtagcacctgctgcccaacctaccacagggacatcaacattaccatgttgtggaagtccatgtaggtcagcatcaaatatcaaactgggctttctcgtggatgttcctgaagttgtggctctcatggccacttgatgagtcccacggaatacatgaggggtggggacggcggtagccgaagactcgtaacttcatattgtgtggacattgcaccaacgacataggaaaaaccagacgatcttgtcatgtaccaactagaattagtggtcaatcttcagaaacctacttttgaagagtcctccccaacggccacccgtacagccgcagtgatgcatacgtcagtgtgactaccgcacgggttgctgcatacatataaacgatacctggaggactgccagctaattgctcctctccctcttttttcttactttccccagtcagcaattgcactctcttctctcagcctctcgatactgccccccccccttttcacacccaccatgtgcgacgaaatgtatactcgtcaatatcttgccaagatgatgggcaaagagatcactacacactgcccggactcttcgaatgaaaaataagctactctctatcccactcgcaaatggcttatcatggaaaagctaagtgagcaaccaaccccggttacccaagaggatttcgccattggtatgggcccggcatataccacaggaaaatatctttgtcggcttgccgagaatgaggatacgctcaccttgatgcgtatctacaaacagattcctctaattgacactgaacctgaagactcgacagttcggaaggaacaggcctgcgggccacgcaaacacgtcgagctgggtgccatgaagcgttttacagagaacggctgcactgctacccccagtcttcttgtgtaccaaatcggcaagcaggatgaagtggaccttgtctctggtgggtatatcacataccttgtatgggaaaaagtcccaggagatcctcttgatattgagcagttctggatgtatccgtacaaaaaacgacagaaaattcggaagagtttccagaaggcctatagatttgttatccgagcttgattatcatatacttatagctaactagaattcgcgaagctctaagcttcaagtacgagccaatcttccagaccccgacaaagatcatagtcgacgaatcagataatgtgtatgttctactccatcccttacaatcccaagctcatagcaggtagcaaaatctgcggtttcagccgggctttcccagtccccaatggatggagagacgaccagtacgtgatgttttccctggtcctggcctcccccgatgacgctgagtatcttcccgcctcggcggatgacctcaaatctgggccaaatggctggaagtggtgaggagcagccagacaagtgtccaggccaaatggacggaagggtcttgaaccaattctctagatagtcaaacagtctacaaattgagtgcatggtgcttgcttaatttattcgtgagattatctgcttattcgagtctgtacaaagcatggctgggtgggtccaaccagcaagcagaattggtggcccgtggccctatgtaaaaaaaagaaagagataaatgccaggtagatcaacgccggtggaagatgcaaaggggggctgggctctaaacaaccgcgtatgctccgaccatgtttccatgtttcatgaaatgacccccacgaaaaaaaaaagctgggccatcgagttctcaaagacaaatcgggatattttgcgcgccggggaaatgaaattgcaaaagcagagagcaaggggttttacactgcaagtggaacgatggtggtccccagagagaaacgagttatcacgggctcaacggtaaccacctggggatatatgagtgataatgtcattatgagagagacagataatagacttaccggagtagggattttggcctccaccgtgcgcagcttgcggtatctgtatttgtgaaatgtcggaaggaatatcaacgtggcgaagaaggtctatcattttctcgggagaaaggcgggtaatattgtatgttgccgcagaaggcaggatgcttaagagattcaccacttcacgaggaagaggagctggagacccttggggtctgtacgaggtgctctggccgttcaactgttgtactcgtttcggctggtcgaggcgccgagcttgcgcgctcttcattggtgactcagcgcgaacaaactttcgtggacgacctgagtcttcatcatattcatcagtaggatatggtctcttaggcgaattgagagaggtatccatgtatctggccatgggagaaccgtgatattccgcggagattcctgccatattggtcttttgccttgtctgggatggggacaaaatgagttgcaccgacgtagggtcaaagttggagttagagtagcgattggcgaattgttccaggacaggatcctccgggtatagttcgcgcatgcggttctccaagttgataacttgggtgaggtcaccgtagcgagattcatactcgtggaggaaggaaaagatgggcttagccttgtacacattctccgggttggatgtcaattttctgacggttgtttcgaacacggctctggcatcttttgcagtggttagtaggtcttctataaacacgggatgtcaacttactgatggtatcattaatgtcgagcagatgccttaagtattcgagcgcaaagtgctcatcctccgggaataattttgcacccctctcgaagatcttggtggctgcagggtctttgtagcaatggtactccatcagagcactcgcgatgtaaacatcgcttgtaatccgacctcgtttccgggcttcggcaaaaatttggcgagagccagccagttcccccggttttcccttaccttgaattcgacgcatcgaacgcatgagtgaaatccatgcaaaggagacagtcttggagataatgttgatctgaacggaatgggccttccggaccgcatcaatctgtgccgtcttggcggcttctctttctttagcttcaggatcatcatcatcctcattttgaggttggctttccacattttgtggagcaaaatatgcctcgatgcgtgcgacgtcctgggtttcctggttgcgagccttattgatcaactcgtaaagagcatcaagcaatttgtcgtacggttcccggaccttggcagcacgcttggcggaatcctgttccgaatccgaggtaacctccaatcgatccgcgcgtttgaatgtcagcaaacaactctctgggtttgcatcaatgccattcttcaagaactccgtgcctgcgtcctccatgtcgttcaagaagcagaactcagctgcatcaaaccacatctcgggcaagaaggccagtgccatgagtgcctgtttgtagaagtacactacgcgtgacttgtaagcagcagggtcttcttctttcagtaccagaggatcttctttttcccatgcgagccagcgcttccagatatctgcttgtgctgagaattcaacgtcgccttcagaccccggaaggggaggcagcggtggaagcgaagtgcgaatcaagtcacgagtgatgttttgcaattcggtgtatgagctacgcgcagtcatgtatgacggtgaatgttcttgaaggaatttgcgtccctgatagaaaaggtcaatataagccagttgaactcgagtactgtccagcttaccgtgagcttgtttagattcatctcgaattgatcatactccttccagagagtattgacagcttgggtcggcacgccaatggctcgttggtaggcctttcgcagtaggtccatcttttgttgatcctgccatccagatccaccaacgatgcctggcccagaacggatgaactcaatatagtctgcccatatgtttccggaatccttgtccatcccaacatattgaatggccatatcatatgccgatgaaatggtcttccttgcctcgccagaggcatctgttgtcaaaggattacgacgacgaatgtaatcaaggtagacagaccaaagctgaacgctgggggttgtcaggagcgttcggttaaagatctgctctaagcggaagaattcattgagctcagactccatgctggcataagccacccattggtcggcctgtgatgtatcccattagcaatcttgtatcttgccgagggtgaaaatgaaagaacaaagaaagggagcaaaggtaggcttaccgccatggggaacaacttcaagaaccgctcataggtgtcacgtgcgctgtctagtctgctgcggcttctgtgctcggcaattaactccaaccaagcagggatatcacctcggggatcctctcgaatccggtcttccagcatgccgacacgatcatgggccagacgaccctttgaggctggagagtcaggtacagaagtaggaacagtactgttctgcatggttgcggattgcaggtcttgcgcagcccagtgcgattggccaggaacagaagagggatcaatattatgaacaggatcaggagaataagaactattggcaacatctggtccactggcaggtgcctgctcagcatggtgtgatgatacatcaggggaagtgttttgcattgcatttcctgaactgggatcttcagacatggtcacaggcatagcattgacatcttcacccccaagtacagccggcggctcatactccgcgtcaccctcatcatcctcgtcatcatcaacctcaaatccgccaattattcgggtcttggactgtggctcagcagtagatgctggcacgggggtcgacgactcaacacgtgaggggttctgagaagggtcgggggagtcactagtctggccagcgtctgcgtctacttctgaggcgacatctgcgtctggggcgacggtcgggttgggaatgggatcttcgggctcatctgagggagccgcatcagtggggccggcaccaggctgcttggactcgggaagggagacggagtagtgatcccccaatgccagtgaggggtcgtagtcatctgattctgcgtctgagttatcaccttcctgctccttagtgggggattgggaatcgggattcaaggcttgagcctggaagaaggcagcttcagcttcatcgtccgccatgatgggatagatgattaatgcgataagagcgaggtcgaagcaaagtaagcaaccgcgaaagtcacggcgcaggccgaagcagggtttgcgcggtgtggtatcaggaggaattaaagtaaagaccaatgctccgaaggtcaagggttaaggtggatcacagccactgttgacgagataaccctcagccgcaatgtgaagcaaataatagccaagagtgagagggtgcaaagctgcgatgggctgtgatgcaagttgcccggggattgaaattagggtcacgtgcgggcggtgaggacaatgcgagggacgcgaaaggcgcgtcgatcgatgggctcctcgcattgagctagaggggttgagagcaaactgcattcttgtggacctgttgttttctcttattttctctatcttcttcttctttccacccccctgttcatacaatcttctactcttgcctctactctttaatcccacgtacatacactcatatcttatcacaatgtccgtcgtctcactccttggagtgaaaaacctcaacaacccggctcctttcaccgcctcgtaccaattcgaaattaccttcgagtgccttgagcagctccagaagggtgagcattggcttattctcccatctcctcagaccactcttctaacattctttcagatttggaatggaaactcacctacgtcggatccgccacttcgtacgtccaccctccctccctcctaccaatgccacaaagtctaactatcacagcgccgagtatgaccaagaactcgactccctcctcgttggacccatccctgtcggagtgaacaagttcatctttgaggccgatgcacctgatgtcaagcgcattcctacttccgagatgctcggagtcactgtcatcctgctcacctgcagctacgacggccgagagtttgtccgggttggctactatgtgaacaacgagtacgacagcgaggagctggcagctgagcctcctgcgaaacccgttattgagcgcattcgtcgcaatgtcctcgctgaaaagccccgtgtgacccgcttcgccattaaatggtgagaaccccttgttttgtttatttacatacctagtgcggcttttactaacatttttttttcttagggattccgatgactctgcccctgctgagtacccgcctgaccagcccgaggccgatggtctcgacgatgacagtggagcttacggtgccgaggagcgtgagctcgaggctgcgctcctcaaggagctcgaggactcaaacaagcccgccgaaggcgaagatcatgagatggaaggcgccgaggcccccgctggcaaagaggacgatgaagaagagatctccgatgccgagagtgaagatcttgaggcggagagtgacgacgatgaggatgagctcgatgaggaagagggtggtgatgctgatgaggatgtcgagatgggcgacgacgcagaacacaaggacgatgctgccaagccaactcaccagcctcagcccgagctcatggtacactagatcatggtgtgctaccggctcgcaggagtggtttctttgcttttaaactcttccttttttttgaatgttatttaacgacagccagaacgcaacgtttacgaccctcggactaattttccatgttattatcctgatttgcattggctatcggtctatgaaatagaattggtataatttaatcccactggcattcagtcagccgttcgtattcatttctctaaatatgccgtaataggcacactaccgggccatatttgtatcacataagaccgactcccagatgcctaactagctatattgtacggagtagtagagggtagattaatgtcaaaaagcgttatactcttgagtttgccacccgagacgaataaacacctacaattgtgagatcaaggtggatcagcttgaagcggggagtcaaaaagtggatgaatgagattgcaaagtgatctgtcaaataacataggcacgatgaccccgctagttaacatgacgccggaaaaaaaaagccaaagacgccgacaatggacagttaagccatttcaaaaacccggtactatttagtaagagatctcgcctaaaagccgaacttggaaccaattgctgttgtcaaagaacggtcagcgacagttatgcaagggggttaagcgtcaaaccctatacatgggtctgtggactttgaaggaagattgacttaccgcccaatatagccttcttcttttgtgactgtacgtatttgccaacatcgttaacaaagccgctgctgttttcctctagcctgtccatgctatctccgacaatcccgagacgctctgtgcgttcttggacttgacgtgacatgtaagaccagtagccttcctgtccctgtacaggtgccgttggaatccgtccttcttttagagctctccgacgttcttgttcttcgaatttcatttgttcgaccatctcctttgatggtggccggtctgggccgccaactaaatttcatattagattctatttagagcggcatgtgcgggagtgacgtacttaaaatgtccatatcagccggcgagatatattgtgtaccggagatccattgcacgttcgtgatggtaggacgcgggggaaccacagctgctgggttgtaaagcttgtcgtttgaaggatgtctgtatgagtagggttagcattagcactatgtctcggcagattaatgagggacacatacagtacgtttccgcctccccagacattgaacagtccaacttctgatgggccgacccatgtcatgacgtttccagtaggggtgatgcaagcttctgagagacgtcggatgtccgcaatatggccaatcttggtgcaaccaatatctcgaagagcggggatcgagaatgctcgcgcgttgccgtcaccaaagagaccaaccaagctgtagccccgtccttcagtcttgacaacagctgctgaatcgcaaagacagtcatcccatgccttgtgagcaccctttgatgttgggggcttgaagattcgacagccagaggcagtcaccgcaatgacaacaccattaattttcgcgccagttctcaagcctccaactgcacttggtgtggccaaagcagagccaccagaatcagcatcgatggggatgacactgattaccctgtcttcaacggccgatgatccagcaaaagcagcttcgtaggtgccattggacccagggaggatcttgaatgttgcgactttgcccttgttcgtgccgacaaagcagcatatgcttgagtagtctagcgcatagttagtacattgatctgattcgagcccgaatcatgcataactaccttcgccgtccaaagtcatcacaccaaattcaatcttagtgggccattcaggttggacttcgtccgaggcacggttcttgaggaacccgctccgcttctgtcccttgaggaggtctgacatatgtgcagtgtgtataatggcgggcccgcgtaggtcaataatcaccaaagtaccgcttttgtaaccgaccgctacaaatcccacctgcccatgcttcaacgccgtcactggaccttgttgcatatccaaaagagtcagaggtatcattcccgtcttgagcccaggatctgttcgcttagttatcgaggtcaactgccctggcggttgattgacaccgggggactcctcagtcccgtatgaggggttattgccccatcggaagacggcaagctctccggtcttgagtccaatagacatctcgcctgagccgctggcgagagacatttcaatcacttcgatattgttgactcggcctatggcacgggcaagatcaatttgaacgacgtcgctgttctcaatttcatcaccgtgcccacagtcccagacacggacggttccatctgcgtgtgcggtcgaaatgatattccggctctcaaatcgcttgaaagtgttctttgcttctacgccgcccatcacaaatctgggtccctgcatccggcgctctctcagaccaagccacaccgaccgatcaactggagtaagcacagctttgtttacaaagggatggacgaaggtgaggaacggatgaagcatgttagtgggagtaattgcgtgtccgctggggaaactcaaggaaataatttcacccgaggatagcatagcgataagtgcgattggatcatgggcgccattgaaatagggcgaggatcgggggatgaggcaaaagtcaacaaccttagctcccggtgggattgatagatttatttgtcgccgtggccgctcgaggtaagtagacagtatctgccaggaggacgtctgatagttgggggttgtccccatgtccaggaaaacgagtcccttgctctgatcacctactggtcgaccaccagccaccaaaagaccagtgtcttccgggttatctttggtgcaccaaatagcctttgtgatcggctccttgggtccagcaccctctccaggtgagcccggtctgccagcagcaccggggtggtcgacattgggtacctggacagtccgggcatgaagcctacggccatcctttgtatcccatagcactagacttgaatcatcatgaacggtcaaaatgaagatcccgttgggatgccagatcgcttttgtcaatttaggtctgcgcacgtcgtgggccggtagggagtctccacctggtgccccaggagggatttcgtagacaaagtacttttgagcaatattttgcttgaacgaaaatgtcactgctccctctggatatcccactaggatcttgccaatgtctcgcggggagaactccagagatacgacgggaaagaaccgcgcgcgagggtttctttccaaccacaagttcggaactttgaacggcgtcaaggactcccgatcgagatcgtacgcaataatctcacctatccacaagtcaatctccagtccttttcttcccctaggaatttacataccattctgcatgccgataaaggcataatccaagcacgggtccgttagcaaggcagttacctggcccggtggcgtataggaaaccaccatgcgtccagtcaccaaggagaatatgcagatttcgttcttggagtcgatgctgaccagtttgtcgccgcaaaactgaaggaaccgcgcggacgcttttcgcgggaactcaaagaccaccgaaacccggcgttgcccaaagacatagatctgcccgctaccgaactgggtatcaccggtaccgaccgcgatgagggattgtatgggatcgtatgcgatagtactaatctgcgaattcacaccgcatcgtgcgaactgagaacagcggtgtcagttggggaaaagagaatgctagggatgccaagaacttacatcgtccaggaggaacaagtccggggacaagccctcggacaggtccttctgtataccagcttgctttcctcgcaggaactgagccatctgcgataggggtatagcaagttatggaggagtagaagaggtcaagtgcggagaagaacaccattgacgccatgcaaaagctaaacaacggatctgccccgctccgccctatcgccctatcaattccgacttggcattcaaggcaacgtgattcttttcttggtcttcttgttctatatataggttgggatgaaggtcgtatgtattttatttcaattggaacccctggaaattcgtggataaaaacgctatataacaatgcaaaaagaacaaaactccaaatcacatgcatgtatagggccagccccgtcgctggaaggaacctcgctatgcaacagaaccagtataatcgagatcgttttaggtatcaccctggacatataaagcgccagacaaatcagtttgccccgttatgccagttcaagtctcgtcatttccgcaatcgtggttgtcaatcgtctccgcgcatcaaattcgctcgtctcatctcgggttcgatagtattgcacagtgatttgggacaccagccggtagcacgcatatctaggaaaagaaagagttagcagaattacactaaattgtaatggtattccaaacacatacaaagccagccggatgttttcctccattgtcctggacgccgccatccctgctccctcaaagaccgccggggatgcatccgcgaatacctctgccatcaaaacatcaccccacatggcactgctgaagtccacgataccagacagctgtccggactcttcgtctaccaaaacgtgggagggtcgaccaaagtccacgaccacaagacgtggcagcgatacatcttcaagagcaggcgctaaacgactcagctcctgccggatctccgagtaaggaaggtggatgaacatgtcctcggcgtcacggagaacaccttcaaccagggaacagaaggcctctcgccaggagggtcttccagcgccaaatgccacttgctgcaaagacccaaacccaggggctgcgtgttgaccgatggtactcaccaagaatcccaagtgccggtcgatatcatccagttgctgggaggtgagctcgccttccatctctgatagactcttccctttcatatattgccggaccaagtaggcagacccccagactcttctgtggggatcataatgatagagctgcggtatacaagggtttgcagactgccctagaagagaaaggaactgggcttcggtctcgaggaacgatcgctcacgccgaagcagagcggtccgtgatgatggggatccctttagcaacaaatgagccccatttgacagcatcagaagccgcaatgggtgcatgtgaccgaaaattggatgtgagtgctgcacacggactgtagaaggaaacagcagcgagaggacatcttctagtctattgtgttcgtctacctcggcggcatgagactgccaacgaaaggaatcgctatggccgtgtgttcccttgaatgatggcatcgcagaacatgtcttcaagtcaagttgcatcataacctgtttggtgggggatgttggcgaatagagaggatgctatataagccaggctatgccgacccatgaatcttggaaaagatattcgggggatgatgtacgaaagggctactcatagaccttgagagccaagaggtcagatatatgccgaggggatagtttgaactgaaaagcatcttcccagcagatgtggcgcaaattcgcttctgggatagagaattcgcgaaggaacccatagtacggagtactctatagtgatccttcgaatatcaatggagcacagcagaccgccatgattgtctacttcatacgtgacccgcaataggaacagtgacagcttattttcggcgacgtgcctcttctaggttcatccacgcgagatacgaaagagaagacatcgctatccgaggttggacatagattgcggagtcgaattcgaagaatctgtttcgctgagaaagcattcacaagcgagagtccaaagacctgttgtcacattggttcataattaataggaaatatgggacaagtaaattaagtgaagccgtctcgcctaacgatcccgctctaagaaaggtgatcatccgagcactttaccccttgaccaatcacaacggttccttgccgaaatcttccagtggagttcagaaattatagaacttttcaagggttctaattgttctagttgttcttctcggttactttccgaactgatttcgcttactattcgaaactagtctatttccgttttagccatcgcttctaatggctggaaccgtctgaaacactcgatgcaagccaccggaggttttactctaaaatgaaatgacttgcatctcaaacagtttttggagtcatgatggacacttggatccgcatacatatagcttctgtcttctgtttcattcttttcgacccttttttggactatggggcttgtcggtacccgtcacgacttatcaccgtatgaattcagtcgctagtgttgagccctctggtatagtatcttagctacaggaagtgtgatactactagttgcaaagatcggggttcaacgtcaagtatgtttagtgtacttttagtgtcgatggtcaaatacatatccgcctcttgtttggccgaggctaaatatatcattctaacgaggctaaaaatataacagaagggttttctctagctttcttggctgtttcatctgtcagctataattcaagagcctctatcatggtactcaattcctccaacgtcgactactcgatactggacgcatgcaaacctcgtcaatagtgtatattatttatgcggagatttgcataaatcatgcaccggaaacaaaccccaatatggaaggtgtctatggtttctgtttcaaattcactcgtcttgctacacacgaagtcgcccgaaaagattccgagttactgttcgacgtcacctgcctatgaaggtatatagatgagtcggtttacttcaaaggactagttatgaatgtatgagaacagcggtggagatgatataagtgtagcatcggtggtagtagttattattgaactacctaccgcggtaagtaatgtgtcattgatgctaagccttagactcagtggccggctctgcttttggtgaaggatcgtagatttcggccaagttgaaccgctttagcttatcataatcacctggcactacactcattccaatcacattctgcgacaagtcagttgaagatttagtagagggttcgttttgtagcactcacttgggcaacatcaacgaggatcattagatcataattcttcagattcaccggatgctcaggcccgacagcatcggcaacagtcttgataataacgtctcgattgagcttcgagttgccccgcacagtaggccgaatggcatactaaataggtgacagatcagcaatgctcaaagtacatttcccctcacagcaagatcatttcctagattagtagaatctccgactgcgaggtagggatgccttcaactcaccgtctttggtggcccacccgaatggaaatgaggcttgagaatctctttcgaaaaagccgccaagtccacactcagggtcttccggattgatgtgactggatgcatgcgcttgatccatcggcttttcttagtctccggatgggcatgtgcttcgctacacagacggtgcacaagctgtaccgggtctattgagggatccagacgcatgaatgtaactgacagggattagcacctatgaacgttccgagggccgagcgcataaacgaaatggcgtttctcggacgatcgcagacttaccacacggcatgtccatctgcacgggctggaattgacgagtattgtttttgctgggctgtaggccctccagttcccttcggatctgggcctcgatatcttcatcatccgtatcgtgatcctcttccttttgattttcagtgccctcgatggcctaggcgaagagttagcgaaaaatagaagaatgatcccaagcggaaaaaaaaaaaaaaaagatctcacctgagtaaaaatatctactgcctcagacaggcattttccctctctgcccatatcgcatgtcacaaagacacctacatcgccagattcaatcgcgacgcgactggcctgtttcccatattttccaccaccctaatcccattagtcagtgctccatcacaagatttgttcgaaaccaacctttctcttctttgaagagtgacttgatctatcaggcatagctcttttccccatttagcaatctaagctttgatatgccaggatgttggaatgtggcccaggtggggggtcggagtttgtgtgatcggccgagagctgcgttcggtttagccccgagatcgacctttttcatgatatgcttattcctccgtacatcggatttgcgacctgtgtacactattctatggcatgattatgtaggtctagatacataataaaggcttatttgttctgctacgtggcctagcctacaaattgactctaaaaataacacaatgtctatcaaagtacgaaatgatggcatgacatcaagaccatgacgtagtccatgtggtctcacctttctcacaaaagttcccctccccctctatcccacctcacctgttcctacttctctttccattctaccatatccctccaatcatatcaatcatcatggtgtctaccgatattgctaccagggaactaaataatcccgtggatgttgccgaatacttattccgacgtcttcacgaggtcggaatccgctcattgcatggtctacccggtgattacaatcttgtagcattggattacctgcctaagtgtggtctcaattgggttggaaactgtaacgagcttaatgccggtaagacagacttgacgacgaatgaacaatccccatctaacatcacctcctcttaggttatgccgccgatggttatgctcgtgttaatggcatcagtgctattgtcaccacattcggtgttggagagctgtccgccctcaatgccatcgcaggagcctactccgaattcgtcccagtcatccatatcgttggtcagcccaccactcagtctcaaagggacggaatgttgttgcaccacactcttggaaacggtgacttcaatgtatttaccaagatgagcgagggaatctcgtgctacgtcgcacgcctgaatgaacccaaggacgcagccactctgatcgacagtgctattcgtgaatgctggatccgcagccgtcccgtgtacatcactctgccaactgatatggttgctgctaaggtcgatggcgaccgcctcaagacgccgattgatctttcattgcccacgaatgacccggagaaggaggattacgtggtcgatgttgtcctgaagtatctcgaggccgcaaagaaccctgtcattttggttgacgcctgtgccattcgtcaccgcgcactagatgaagtgcacgatttggtggagaagtctggattgccaacctttgtgactccgatgggcaagggagctgtgaacgagacccacaagaacttcggtggtgtttatgctggcaatgggtctaacgctggagtcagcgaggccgttgaatcctccgatctcattctgagcattggaggaatcaagtccgatttcaacaccaccggtttcacttaccgtgttggacagctaaacagcattgacttccatagtacctttgtgagagtgcggtactcggagtatcctaatatcaacatgaaaggtgtcttgaggaaggtcgttgagcggatgagtactctcacccatgctcctattcccccggcttcgaaccgactacccgaaagcgagaaaaactctaccgatcaaaccatcacccacaagtggctctggcccatcgtcggacagtggctcagggaaaatgacatcatccttacggagactggcactgccaacttcggtatttgggacacccgcttccccgcgaatgtgactgccatcagccaagttctctggggcagcattggctatgccatgggagcttgtcaaggcgctgccctcgctgctaaggagttgggagatcgtcgaaccattctcttcattggcgacggaagtatccaactgactgtacaggaactaagcaccatcctgaagaagaagttgaaccctattgtgtaagcattcccagcagcccggaatgcccatatcatatactaaccatctccagtttcgttatctgcaacgacggctacactattgagcgatacatccatggatgggacgcaggttacaacgacatccagccatgggactttgccaacattcccaaggtcttcggaggagacaaggacaactacgcaggctatcgtatcaagacccgtgacgaactcaacgagctgttcaccaaggaggaattcaacgtttccgacaagcttcgagtgagttatcaatacaaagaagtcccaaactgtttgctaacacggtatatagctggtcgagctgtacatgcctcgtgatgatgcccctgcggccttgaaattgaccgccgaggctgctgcgcagcgcaacaaataagcggttcgaatcacgagaaagtattatgactcttgtcgtaacgttacgatgcatatgaaaagcaacatgatagcaatacctgaactctgaattgtttaggcctcggtgctttctttccattctcacggctttcaaagggggtggccgcatagcggcgggatttaataacggtcgttgagtatgtagcatgcacatcttcgctcttcactcatgaaatacaatgaaatcttcatatcttaagttagaagtctaccattatcaaaatctgggtagatatatcaagacatgatactaagtagatgagaaaatgcaagcaacgccgacccagcgtccgaggctagtacgaggctagtacgaggctagcgtcgctacaatgtcaaaataagcatctcgcgttcaaagttaaagttaccaagccaaatgctttgaagttttctctggcagattctgctcaatttaaaccaatgtcaacctataattcatttctaaagctgcatacactcctgcttatgggaggtaggaggtggcatctttcttttaatgtggaatgtcccggtgggaccacttgtcttcgattaggtgagagatgtctaggaagttctcagggataaatttacgatatcagatgcgagtccttttgtcattcgttgagctccgatgatatttgcctccgctaggatttgggataccggtgagagaaaggaaaagaactgcccaatatcaatttcctagaagagcctcaccctaggaaactctaccaatctgatttaactaaagtaaggttcaccatccacgtggaacaataaaaagcggaaataggctaagcccgaagggaaactcctgtccgaaccactaccggaaacagcaataagtcatatgagtccatatgagtccgaagtacggagtagcgaagaagagacatgtcgaatgagcactgaccgtgcccaggtggacacttttacgctaaggcaaagctgtgaatcatctcgactgctaaagctaagctacagtgtgactatgttgtgtatagatccgaatttgccgagtccagactgacagcaaaaaacgaaaaaaaaaatctcttctcttccaagacctgaaaataaacaaaattcccgatggtcgccgagaaacttggaaggaacaaaggaaccttggaacgaacctaggaaccttccaaagttggaaaggcccgagagcggtccaaacacgcgggatttgatttttaggattgatctgataatcttcatctgataagatggaaggcgaaagtgtgcctggtaaccttatatccaggaacgatcttcctgttcatcgctcctcgttgatatatactcgatctgcaagtctacaaatttttcatgaaaaggtcatctctgtgtcccatgacagcctgctgatctcgggtggagctccgaaagcatctgattacctgcctctctccacttggcgcaaaataagcccttagcggccaaaatgcttgcattctaattgggagtctgacgggctggattaatctatcatgctttcggggtctatgaggggacctgacttttatttgaatatggcaggttcccctatgcttattgatacccttggatattccaagccatatctatatgtactctacttctaatgttgtagatagaattttacatttgagtacatatgctaggtatgcataagacaaaaagcctgggacgataatagaatgcaaaaaaaaggaaggggaaaaaaaaaacaatcggcctgccgcgactgccggcaaactagagagttagccaaactaaccgaaactggagacactcggatttggccgatgagtctgtaaaccaatcattgcacagtattttatcggcatcattcagccgtgagaagcattggtgaatcccacacacttccaggttgagtggcgtgtcggctggtccgttgttagagtcttaattccatggcttggggtatctgatccgtttatctccgggactttggtggactaaccggtcctggctattccgtgcaccttgtaaggttcatggttagcttccaaaaggattcaactcactaaaaaactctttagatgctccatcccccatatatagctggactccccgagtgtacctcttctttccttttctttctcatattctcaatctttttttcggagctccctatactgtagtcatgggtgtcttcgatctgattcgtggtcggaaggaccaggtggtcgtcgaggatctgcgcccaactcaaggaaatgagaagcccgatatcaatgtggagcaaaacacggtggacgatcatctgaacaacctgggccgtgcagagaaggagatcgaggaacatcctgaccaggtcaccgcgaatactgcagatggtgtgcgcaaggctgaggctgttgctttggtctggagcaagccggctgtttacgcgacatatgcctggtaagtactatggatgagaacggcatatgaactagaatctcacatctacaggatctggatctgtttctttatgttggctttgcattcctctatcggttccaacgttctctactatgcctactccaacttccaggatgcttctcaggtcagcacggccaccattctggcaagtatcgtcggtggagttctcaagcttcccatcggaaagatcttgactctatggggacgtgcagaaggtctcatcatcttcacaaccgtgtatattctcggcattatcatccttgctgcttgtaacaacgccaacagttacgctgccggttacgttctgtactgggttggatatgatgcgatctacataatcctggacatctttattgccgatacttcgggcatgcgcaaccgtgctttcgcctttgcatttgcctccacaccattcatttgcacttcattcacgggtccactggctgctgcgaatttcctgaagacttcaaactggcgatgggcctatggtgcctttgctattatcatgccctttgtcttcctgcctctggccggtgtcttcaagtattatgaaatcaaggcccggaagatgggtgttttgcagcgcccagttagcggcaggactactatgcaatctatcattcactacttgcacgagttcgacagtgcgtatatatcttcccttctgtcctccacctatcactgaccaaatttttagttgtcggtgccttccttctaatggcggctttcatcttgttcctccttcccttcagcttggccaactatggccgtgcccagtacgccgaagccagctttatcgcgcccctggttattggcttctgcctcttctttgtctttgcggcctgggaaaaatggatcgcccgcacccacttcatcccctaccagctcttcaaagaccgcaccgtcctcggcgcctgctgtctctccgctatcctctatttcagcttctactcctgggatctatactactactactttgtgatggtcgtatacaacctcgatgtcacgatgaccggatacatgacagcgatttacaccgtgggatcctgcttctggtccccgatcttcggcatctggatccgctacgttaaggagttcaagtacagctgcctcttctttgctctaccattgatgatcctcggcgccggcttgatgatccacttccgcggctcggacggcgatattgggtacgtgatcatgtgccagatcttcattgccttctctggaggtatgttggtcatcggcgagcagatggccgtcatgtgcgcgtctgaccgtgagggcatccccatgatgatctcgctggtttccttgttctcgaacttgggcggtgccattggctatgccgtctccgctgccatctacgccaataccttcccccagggactgcgcgatgccttgcctgagagtgccaaggatcagtgggctaccatctattccggtggctatgttactcaaatgcagtatctacccggcactccggagcgtgacgcgatcaacttcgcctacggatacagtcagaagtatggctgcatttctgcgacggcgattcttgcgcttgctatcccctgtattggtatgtggagacattacagggtggacaaggagcagaacaagggcactgttctctagatctggagatgaatgaggacacatgatgtgtccaaatggtggatgtttatgacttttcaaaaataattcttacatgtatcctgttaacttactagcgagatacaatgtaattttcctcgtttagactgtttttccactgatagttcgctaatacttctagtagaagtcctccgaaggcgactactttcatgccagtattccggaccatggtggctaaggcatatgctaagttttggatttatttccacccaatgcttttagagcagaccgaaaatgaagatgcagacgccacagcactgtcattggcgcgtagcagataccaggtgatcacgggccaccgaaggtgagattgggagattgcagggccagacggggtctgggggatatcccatgaagaaagtgctaaaagtacgatactagttatactgttccttctttctcaccgtgtactgtgtcctatgtacatatgtgctactactataaccctaaaaggacaggaagagggagtttaccatatccaaggaccacgtgacgatccccctcgagacatcacaatcaatataatcaaaggccatttgatattatcacttcaagcattcttggtgagttccattcgcttccgaaatacgatcggaagtaaggagttgtggtgttctgtgctcgcttccacttgcttgaattccattcgccttttaaccttccaatcttccaatctttcgacccaatcgcgtcgccatcacaaaaccgcaggtggctaaccatgtactgagttcgcaagagcttttctttatttcagtcaatcatctttagattgtcttggcctgggaccagcccgtcgcgcgatttcagtctgttctgcaatcccaagcgctgcgataacatcggcaacgacgccgaaccaaaccatgtcaactcacgcactgaggatctaaattcgttccatttctgcccgtccgaagcgaccaccgagatcgagtatccggccctcaaatccgaccgcttgtttggcgctgggacgtctagcatgatgcgttaatgatcctacctgaacaaccccgaaaaccaccttcgtccgaacctcccctggacgtcgcagtcgagacagcgggatataactgcaattaatagccagatccagtgcatcgggcatcacaatggatggacgtcaacagtatgtcccggggcccccgccttcctctcagacacaacaacatatgaacctgcctccccctccacctcgacatccacaagcccaaacgctggtgccaccacctcctcctggcccgccccctggcccgcctccaggagcgacctatggaactccgacaggatggcagcaaaactgggccagaccggcgctgaacccaggcttcccaccgccgccccctcttgcccccgcaccaaaccagcatctaacatacggtcgcccaccagcgcacttgtcgatcgttcctccgcgccatgaccatcagcctctgacatccgcaacttatatacccgggaacgatactattggcgtcggcattccggggttgttcgaccccaatggaagagctcatccgtacgcgcacaccaatgccgagagacaacggttgggtctcagccaaatgcaagatcacatcaatactccaaccccgtataaaccagatacaagtcttccgcagagccccggggcccgcaccgtttcttcgccgtacgctcttcataacaacattcatgaattaacgtccaacgacagtccgcagcaacaggcgacagctccaactaccgagcttactaaaacgacaagtcatcgttacaatgctagcggtacttcgctgggcggtttatctcacagcgaagcggcgatccagtggccattggatcgcgtgctcatctggcttgcgaaaaatggattttccaacgactggcaggaaacattcaaatctttggagcttgaaggggctgacttcctcgaacttggacatggatccggcggacgaggaaacctcgggaaaatgcatcaagtggtttatcctcaattgtccaaggaggttggccggagtggcaaaaaatgggaacctggccgggaacgagatgaagggaagcgtatgcgcaaactcatccgtcaaatacatgatggttcgcaagactacaccgtcactaccccactgaatcagacgcagccgccggcgactgcgttccctgagaacagtgcggcttacttttcttctaaattttccgagccacgttcggctggccctatccctggtgtcaatgatgtgagtcaggatcatctgagtgcattgcacgcctccaatcaagcccaaaagcagcctgggcaacgctcggttaccatgccggtctctgctggccacgattcgcctagaaaaaatgagtctccggcacgagaaaactgggcgcgatctgactattcgcggtcagagtatacccgcaatgccctatccggaataaacagcgaccatcgacgccagagttcgtccattggcagcgaatcgggcaattttcagggagcatctcttcggccacatgaagaaagtccaattagtggcagcccagccatgcagaatgtgtcacccgcttatgcaggagcattttcatcatccactggggatctgacgttgagaccgtatgatcactctcggggcaatagcaccgaatcgatcaatcggggcgctacaggccggtactacgattcacgtagacaaggccatgaacatgaatctcgcaggctaggccaagagggtactcgtccctcgcctcaagatgcctccagtcgacaatggaatgaccaaacctcgtcttcgtactccaaagaacacaagggctttttctctaatattctgaagaagaagacaagaactacggcttctagccacccgtcccccgatcatcagcatgaagactcgtcgcctacgacaagcccggagactcgcccgaatgaagcctatctcccttacataaagccttcttacaacactagcgacatgtcggtcggtgagcgtccatccacggcgataacaaggacaaagaaatggatatttgccaccacggatggcttgaactaccgtctgattgacatcaccgatctcgactctttcgagtcattgcgtaccgggatctgtgaaagcctctcgatcgacccgagcaatgcgcagatttaccttactcagcccgggcaaagcgagcatgatgatcctatgagtgacgcataccttgcacagtcgcgtcgaaacaagtcagatgcatacggttctctcaagctgtttgtacgagggactcctatgcttcctatgccaccccatactcctcgagttgatggcttgggagtttctttcatagaaaagtccaatatgtccccgacggcaacacaccaccaggtccaccggaagcccttggatgaagatgcccttaacaggttatcaccgcaccgcaccagaccagagtctccattgttgggctctcggcaaagcactctcaaggcttctacagggaagccatccccggcggagaccgtacaggacgcaagccaagctcttgggtctgacaaatccgatttactcgctcgccatgaggaacacctccgtgaggtcgaacgtaaacaaaaacaatatttacaatctaaaatgccgctgcaaaacaagaacgcctacagtgacaccgggtacaggcgaaacgaagtcattgactttgatagtcctcgtatatcgccttatgacgaaaagaagggagattcgcttgtaccacttcgtaaacctcccacagcgccaatcgagtccaacactcttaccaaggtcaattctctcagcaggagacccaccactcgtgaacctcgtgaagctcggatacagccgtccctgggcgctgcaattgctagcgttggccgcattacaagtgcagttggcacgccattgccttcggtaccggctccatctacgccttcagccaacactcaaaacagtgcaatctccgagtctgatcgaccaggggcatttgattctggaaccttttcaagcagaacacccctgggtcagtacatgcacgacacagcgcggtctgatcgaccttcctctgactaccttccagactcttcgagacccacttcgaagatgactacagaacgcgagaaaccgccagtctcgtttgccgatcagtcacccgaaaaggcttttggtgaagactcgccgagacctggcttgcaaactcgcaagtcgttcggtccagagttcgactttgaagagaatcaagtatccttccagcgaaccccccaacagcagcaagactcagatgacgattctgatgatgactcggacgatggcctattccaagtccgaccttcaagggttcaggaagaaccgaaacaaacacaaaccgaggccgaaaagaaggcggagaggccatcgctgaccgtgaacacgaaagatcaattaagatcaaagttatctgtcaggttcaaatctccgagtactgccggtcctagttccggcggagaggcatctgatgggaaggaaccggtttccagtacctggggaccagtctcgcctgaagatgagaggcctggaccacagcgagagtcatttgctcgagatatctgggcaagcagacctgccgtcgaaggcgttattgaccacctcgatgacttcttccctgatgttgatcttgacgctccatacttggatgagccctcatcacccagtagcaagactatcaacgaacatgacgcgaacctcaaagacaagaaggaagtaccgccacccatgccaaatgcaccccatgcgcctgatacagcgccagtgagaccgcccgaacctgccaactttgctcgacagaaacttgctcgtggtggtgtcggtggcggcggactctctcgcatgaaatctattcgacaggtggcccaaggagcgaaccggacgaacagcgttcatgctggtccgcaaaggtcgggtgatcttctacgccgaaagagtaccaagatgttcggcgccaaaattatgcaaatcaggccgaggccaggtacccggcttagccaactcgatccgattccgcaaaacagcgcccaactggcgtccaatgccgggcctgttcctcagcgacagcccactttccgcattatccgtggtcagctcatcggcaagggtacttacggtcgcgtatacctaggcatgaacgccgacaatggtgaagttttggcagtcaaactggttgagatcaatccgcgaattgcaggggcagacaaagaccgcatcaaggagatggtcgctgccctggaccaggagatcgacacgatgcagcacctcgaacaccctaacatcgtgcagtatcttggatgcgagcgcggcgaattttccatctccatctacctcgagtatatctccggtggatctgtcggaagctgtctgcgcaagcacggcaaattcgaagaaagtgtggtgagatcactgacgcggcagaccctggacggactggcatacctgcacgacaagggaatcctccaccgcgacctgaaagcagacaacatcctcctggatctcgatggcacgtgcaagatctctgactttggtatatctaagaaaacggacgacatctacggcaatgactcgtccaactccatgcagggctccgtcttttggatggccccggaggtcatccagtcacagggtcaaggctacagtgccaaggtcgatatctggtcccttggctgtgtggtgctggagatgttcgcgggccgtcgaccgtggagcaaggaggaggctatcggcgctatcttcaaactcggcagtctgagccaggctccaccgattccggatgatgtttctatgaacattagtcctgcggctcttgcattcatgtatgattgcttcacaatgtatgtcttcgtctgatttgttcttggatcgcctgattatatttactaacgtcctccagtgactcggctgaacgtcctactgccggaaccctgctcacccgccatcccttctgcgagtcggatccgaactacaacttcctagatacggaattgtattccaagattcgcgatgttctttgagttcccttggtttgatttcttctttgactgggttcggcgtaacttaacgactttgcgctttctcctatcgaccgtacatacccttttcttttacatgcttgaggccaaatttcgtctggattctttcggctttctgatcagctgtacatacttttttcacgtttgtggataataacatttaccggggaaactagattatttccctctttacggtccaattgtgatacgctacaatatcatcaagctgctatgaccaaccaacaagaatttatacaattcctcgctttagacatgtacagaagtgctcaattcaacatggtatctatgctcaagaaggggatataaaacaaaaaggtcataagaacgagtccaatcctaagagctggtgcttaggagatcatcatcgtcctcggggatatcggcctgcaacccagcgacaccgacgcggaacacaccctcacaccattcggcaaaggtattaacatcccagacagcatcgtcccgacccttccctttcttactaacaaaattgcccttcgccttctcggaggaagtatacttttcaaagaaatcctcgtaaatctgaatagtgcggtcctggaccgccccaacaagcgtctctttcatacgcgtgtcgtcgatatactcattcaagaccttgcgcaaacccggcacctccttctcgatagtgcggcaagaaggaaggataagttcgccgcgggcaaggttacgggaatcgatgaattgagccggcagcgaggcggtcatgcgagcagcaaaggcattgatgaagtcattgataaccgtgcgaaggcgaccatcaagctcgactttcgcgtcgagcatgttctccacgacccgcgggatgaggccgtggcccaccaggcgcatcagattacgcgggttgaagaggccgccgcgttcgcgcagctcccagaatgtacttgtcatgccggagaagtcgaaggagatatcggcggagacatattcgatgtcgaaggcgacgatttgttgctttaggattaggaggtggctcattaggaagagttggctgtcggctggtgtggctttggcggctattagggtgctagcgttttggagagagagggttgtttggtgcacgatttggtgagctaaatcgtcgaagacagtggactagggtggtcagtatgggtgggtaattaggcctgttgcggggaggcatcttacattcactaggcggtatattcgactcagaagccatattgcttttcgcagggttggataccagcccttcagagcggtctgcgtctcaaagtcccatttaccgtctagctcttgtgtagattcgcctgtgtcatcgccttgtttggccgtcatgtcgactagtgtatccgcggatgtgtccttcttgcccgatatctgagtatctgacacagttagggatacctgtcgatttcgcatggggtaatcagtgtcctctgggcgaggtttgtatcgttcgatttcgtcgcgcagaacagctagagcacggaagacaagccgggcctggacgtcttgtaaagcgggctggatcaaaatagaaaagtcaagatggttcgtttcaacctgttcgagttcttcttctgggtccgagaaatagcgagtctgcagtagattgcacagctgacatagtctgacgatatcagactcgtgaatgatccgtggacgaaggtgatcataaagtggttcgcatagcgtctcaaggaagtcatataaacctccctgtccgtggaaccattctccccatagatcatattcgtctaggcataggccacggatataactgatgctagctcgagcaaaggcaaccaggtccttggacgaactaggtgtctgtgtgatttcgccgagctttttgcgagcgagcggaagtatcagcttcgcacgggtagccgagtaattgctgtgcagctcgttcatcaggctttgatattcagcttcgttattttgatctgggttgagcggtggtacggctctcttttgaatctcgactccaatctgcttcagttcaggtgccccaaccctaaatttagcgtacaggagagccgacagagctgtgtcattcaattgctgatccgatatctttttggagacgctctggtaaatatccttaagtgaagatacaaagttgccgcggataagcgtcaaggcacgcgttagcagtagccggtatctcgagcgatatacctctgcctctttttgatccggctgcgtagagatcagcgatgcgcatgaatatccccgacttgcttactcacatgtgtttccatgtaatccaagcacacgtccagatgcctcaacatatctgagaattccttgtcgcgaactgtattacccgcgccgggagcattcaaccgccgcgatgcgggatctaagaagtcataatagtggaggttggtctggataccattcgcaagtttcgtatcccgttcctgggcagacaaaaggccttggcattgcttctcgaaattccatgtttgtgtctcgaccgatttgaatgattcggacaagctggataggtcacccagaagggtcagggtgttcgttaagatttcgtcaatgtgctcttttgattgttcaagttcatccaagcaattcctttaaagaaatgaattagtacgcctccgataaccgtccaatgtcaatcgtactggtactcgtcatagctctcctcaatcaagtcacccttgacaccattaaaccactgtgaaaactcaagttcgttgctccatcctgccgttttccattcaaaagcaccgggcggcttctcgtccaatgcttggaggcttgattgggtttctttggcggtgggtttgcgcggcgggccggagggagcggtttggcggcgggcacgctgctgctttgtggaaggcatagtgtggtcaaggcccagagagtgcgatgggagtcaacctgcagctcatatctctctaccgactttattctgagtaaaattcaggccaagtttgatgttgaagccgaactgcgatgtgttcaactccgagacggattctgccgatagctcccgcctagattgctgcaacaaatcacaggcccggcattaagagcttccccggacataatctcacctttccagcttcggtatgctctacctggtgattcagcaataatctacaatgttcacaacccaactgcgacggcccgcgacgcactccgtcctcgctttccgcccactcagaaactcgacggctcagtcactaaatgcgccatggtcccgatctgccagcagtaaatcgcgaaaggcaggcccgtcatcgcactggattcgcaattccctcgggtttgccgtgacaggaactgcagtctttttgggatactcatacgtggctgatggtggaaaggaggcttggttcagtcgtccgcaggttataaagaaagagcccgttgacgtcaacgatctcgaagctcagttcgtccaagaaaaacgaagcctgaaaagccccggcgtctacacatgggggtcgaacgtttatcgcgtggtggatccaggatctaaagataccgatatcaagactcctcggcgcttcaaatactttaatggccaggttctgagggatctcaagatcgaggaaaagtccggtgcagcaatcaccgagaatggagatctagtgcaatggggccaggcgttctcggagtcggacttcaaacccacggtaactctgactggcaggaatctcacctcactcgttctgtccgaaagtcgaatcattgcgctgtcctcggatgggactgtatactcactgcccacatccaaggatgggcaaaacaccggcccaaagacaacggaaagctcttgggttcccttctggcccaatcagtctaatctgagctaccgtgtactgaacccatctttgaagcttggtgaaaaggtcaccgcaatcagtggaggacaggaacatgtgctgcttctcacaagctctggtcgagtcttctctgcggcgtcatccaccgaaaattacccttcgctaggtcaactcggtgtggagggacttacctggttcaccagacccaaggggccagcagataaatgccatgaagttacagctctcaaaggctccaagattgtgcaaattgcctgtggtgactaccactcactggcgctaagcaaagatggccgtatgtttggctttggcgacaactcatttggccaactaggtgtggattttgaagctgagaggtctttcaaggatgctcctttcgaaatcaaggctcaaaaactctatagcagaaaccgctatctgcccaaggttaccagcattgctgctggtggcgccaacaccttcttctccgttgatgccaagcgcattctagggtacgaagaagaggcagccgatgttcatgatcttggaaatgtaactgcagacacatgggcctgtggtaggggaatttggggtactctcggcaatggcagatgggttcacctgcaggattcgcctaccaaggtgaaagctttaagtggtgtgagcgagtatgacgagaagacaaaacaaatgacccctatccgcattaggtccatgtctgtcggtacaacacatgtcgcggctatcctggacaacaagaccaatgtcaccaagactatcaaggacactttggatcaaactaaagactggggctatgatgtactctggtggggaggcaacgagcatttccagctggggacaggaaagcgaagcaatcaatccaagcctacttacatcaacgcaccccccgaaaacaagaaaagccagggcgaggcgcgattgcagatcatgcctcgtcacaagggcaaggtcgggaagcgcaatgtgagcatggaacagcgtgttgaatgtgggcgtcatgtctctgccatttattctgcggtgtaaaggtaaaaaaaaaaacctgtatattagtgatgccatatgaaatgcaattataattcgctttactcggtcggcctgttgtttttcttttggtctatagaatcaatcaatggatggcggcaattgcaaacagaccaaacgcttatcaccgcggagacgcttggaccaccgcttatccaaaaaatttccagcgcttcaagaccatcttctctcacgacacacctccataatgcctcgtgaacaacaaaaaagaggccgcagggccgagaagaaagcccaaaaagaggactccaagagaaagttcgaggaaacccccgaagatcccgtcgcgaagcggatgaagccctctgccgacgacaccaacgagaccaacgatgatatccaaattgccggaaatgaggactacattccccttgacccgggcgaagagcaggaagctcagcgacctgatgaggatggagacatgcctttctacggtcttctagacgaggaggagtcagaatacttccagcgcgccaacgaaatgctggagctgaaccagttccaggacgccgaagagcgcagcttgtttgtcgacagtgtatacactgaagctagtggcaaggagttgaaaattgcctgcagtcagggctgttcgcgactcatggagaaattgatctcaatgtccgacgctcgacaattgcgccggatattcagcaaatttatcggccacttcctccacctagtgcagcatcgttttgcgagtcattgctgtgagacgcttttcattcacgctgcgcctgctgtgatgcaaaaggtgaaacctcagcccaaaaagtcagacgaggaaggagaggaagagccggagctatcgatcgcagaaatgttcatggctgttattgaggaattgaaggaaaattgggggtacctgttgacggagcgctttgcgtcgcatacaatccgagtgctactgcttgttcttgcgggcgagccggtggatgtcacgtcaaacgagtcgtttgtcgcaagtcgcaagaaggaaagaattgagatcccgactgtccagggcgaagagaaggcagcaaaatccaaagccgagaaacacactgttccagagacattcgaaccggcgctcaagaagatcatgaccgatatggttgccggtctcgacgatgtttatctccgagctctagctacgcacccagttggaaaccccgtacttcaggtattgttgttcttggaactttcgcatttcggaaagtctagcgccaaagatcccaagtcgaccatccggagactggttcccgatgagacgtttgaggaagattccgaaagcgctgttttcattcgtggtctcctctacgatccagtgggttctcgcctgctagagacgatggtgcgatacctccctggtaaatcattcaaaaacctttacaagaacaacctgggtgaccgaattggttccctttctcgcaatagcactgctggatatgttgttcttcggatgctcgaaagactcggtaaggatgacttgaagatcgccatgaccaacatcatccccgaaattccgggcctaattgaacggtcaagactgattgttcccaaaatgttgatcgagcggtgtgtggtccgtggcgtcgacacaaagcctcttgccgaagcactcgagggtgcttatagccaggaccctgttgtcagactgcagcagatgctcaagttcaacatctcggagagcacagccccggaacctgaagaccatgatatggacgaggacaacgatggaaaggaccgcaagccacggggcccacccccagtatctgcggcggagaaagccgagaaactgcatggctctctgttagtacaggccatgttgaccgttcctggcccgctgagccaacttgtctacacgagtctcctcgcccaatcatccgaaaccatcgtacaacttgcccaagaacccacctcttcccgcgttctccaacaggctctgacttctacaacctccacgcctcaaatccggcgacaactcaccacccgtttccagggtcatctcacacctcttgccttgagcagcagcgggtcacacgtagtggatgcgctttggactgcaaccaaggacatcttctttgtcaaggagcgcatggcgcaagaactcgagcagcatgaacaggagctccgtgactcctttgttggtcgtgcagtctggcgaaactggtcaatggatctcttcaagcgccgccgacgcgattggactcacaaggccaagggctttgaggagcgaaccgaggccagtgaaggtgccgaacgtcccaagtctaaactagaacaggcccgggcccgttatgcggcagcaaaggaagcagccgatgctggtgctactggtgcaaaccagactgcggtggctagcagatgaagtggtacaatggtgatcaaaaatttatattagacgaaatgcacatgtactcataaaaaggcgttgatgcattcaattgtttcattgctttatatctatttccatacctttcttatgaatcgatattatatttcaaaacatatcagagatatcttagaaaattgataaattgtatatagttcatcgaccacaataccgtgagggtattcgggttcctgcagatcagcccgaatcttaatatccttgtctgcatataatatatgcaaggaatctacggagtagttaattgggagtatacaaactcaaaactacatgaaaatccgactcaaaaacattctactagccgagtatagatcatcgcatgagggcttaaggtacggatgatgtcaggctctgcgggattgtcgccatttccgtggtcgccggtaaacttttctttccttttcaattgcgtcttctgtcctctttttcttttctgtttcttctgtatagaatttgcactgtctctccttaaatttgcatatactagaacgtgagaatctgtacaaatgtctggcattgcgcagcccaatcgcgctgatgaagtgcaaagtgtgagtcaactctatatcgcaatgatctacaccccaccagattctttattcgatgttctgaaactaatgcgagcaccatgctcagcttctgaaagcggtggaagaccttctcatcccctttatccgatccgcagacgaggatccccgcgggtccttgacacagaaaaatggcaccaacggcaccaatggacacactggactcgttggaacctcattgatagattataagaagcctgaagagctgcaggatatccttcagcttgagatcccagagaaaggcaccaagcaggaaggtctcattgaagtcttgaaaaaggttctgcaatactcggtcaacacctggcaccagggatttttggacaagctgtatgcgtcaaccaatgcgcccggcgtggcagcagagctcatacttgctaccttgaacaccaacgtacacgtctaccaagtgtcccctgcgctgacggtcattgagaaatataccggccagcggttggcgaacctcttcgggctgaacggtccacaggcgggaggcatttccgtgcagggcggatccgcatcgaacaccacctccattgtcattgcgcgaaacaacctataccccagcacgaagacagacgggaacggcgggtacaagttcgtgctcttcacgagcgcacacggccactacagcgtggaaaaggcagcgcagatgctcgggttcggcagcagtgctgtctggcctgttcctgttgacaaggtcggccgcatgatcccagccgagcttgagaaactggttcagaaggcgcagagcgaaggccggacgccgttctatgtcaatgccaccgcaggcacaaccgtcctaggctctttcgaccccttcaacgaaatcgcagccatttgcgaaaaatacaacctgtggttccacattgacggatcctggggtggctcgttcgttttctcccagcgccagaagcataagctagctggcgcagagaaagcaaacagcatcggcattaatccgcacaaaatgcttggcgttccggtcacctgctcttacctgctagcctcggatatacgccagttccacaaggccaacacacttcccgcggggtacctattccacagcgaagaagacgagcccgctaccaacggcgacgcaaacaaagaatccgagttggaagtcgactcaccggaagtgtgggatctagcagacctcactctccaatgtggtcgacgtgcggattcgttgaagctgtttttgggttggacatactatggcaatgagggctaccgacagcagatcgactcggcatgcgacatcgctgcgcacttggctaataccatcgcgcaacatcctgatttcgttcttattagcgaaaaccctccgccctgtctgcaggtgtgcttttactacgcgccaggcaagaagttcgtgtacccgcgtggcatcgtctcgaatgagacacagcgcgggaagaataacagcaaggtcactgagcaggtgacgcgtgcaatcgtgcccaagggcttcatggtggactttgcgcctcccagtggagaggaggacgaggatgcagctgggaatgggaagttcttccggtgcgtggtgaatgtccagacgacgaaggagaccgttgattcgcttatccgcgccatcgaagaggtgggtcctggtattattgagtctttgaaggcgagcaacccggcgcttccgcacaagcggcctggtgagcgtggacacggacctgttgtccatcgcgcttgagcaggtgcgtgatttgttttcttctgatttacttggtatataaagtagagcatgtggatatgagagatgggatacgacatacaaaagatctggtgaaatatataaagctgtgtatcaatttgacaccctaagaacaagatgagcgaatatctcggcgctcaaaatgcagaggatgtagagcagtcggcatagtttctaactatacctacctggacagtagtaatagaatttgtgcaaggagaatagcttgagtatagaatgatatcaaagccatcaattgccaatctcgacccttcgttccaacacggaccgagcctcagcttccgatagagagtcaatctctaattcagcaagcacagcccgtgcactctcgttgtccctgaacaacctcttttccacatcccatagccttaaaggcacatcttcctctgtagagacgtccccctcttgcttagctgtacttaagcaaagtatacgcagtccctcgttgagctttttgatggttcgcaatgagatccccacctggctagatgcgccgagcgcagaatccacaacgtgacagagatagtcgacatcgctcgcaagctgggccgctccagtctcggaaaaggtatgtttggtcaagacgttgtcccagatattgctctggatcgataacaggagctggcgcgagactcgtcgtagaggcgcagttccgagcgcccgagagaggaaggatagttgtgcggacaagacacgcattgcaggggcgagatcagaagtgggtgggaggggagatgccgtcgctgtggcagaagggggtgacagcgttgcccacgtagatacacgagagtagggcttcagagccgcgaggatattggaggacaaggtggatgtgatgatagtttccgagcgaagtcggagacgacggtaggcggatgccgtctcatcgaagagagcaccatcggatgaggtcgcggtgtggccgccgttgttgttattagcgactgcgggtgacgtacgcgacgctacctctgcgacagacatagtaccagctacgctgcgaccgttgtctcggttttgttgaacccgatcttggagctcggaccagagctcaacgaagaacacatcattactccaatcctccatcttcttttcgaggtattcggcacttccgaaaaccctacaaagccgctccagtccggcgacaccctcgacgctggcttgcccatcggcgccctgtacagtgcgtccaagcgttgacgtcatcgcaaggtaggcctctagtgcagaatagaggcgctcatggaactggtcgaaaatcgtgatttgaatgtcaatgagaaaccgcagcttctgactaaaggaggatagtggttgatagcgatcggttatagtttcgagaaggtcattcacgcggatcgcagcctttgtcggtttcgttgcagtgagctccatgccatcgtagtcgatctctccactgtccgcggtgtcgatgatatctctgtatcgcgccaatgcgaagttcttctcaacctgaagccatcgatcataccagccctgtttggtcaacacttcccaggttatgcccttccaattgtcgtccgcatatggatctggcgtatagttccatgtttctcgcatctcgttatcgaatttcatcagttcatgaatgaattggctgagcaattgggggtagtttgagatttgagggaggaacaggctgatcttatctctcagcataggaagcaatgcagtaatgtaactatgtgatgcattgtaaaagttccattctagacttggaccgactgcttcggccctttcatcaaagatgggctgcaagtaagacacaaaaaacccgccgtattggttgacaaggtccatgatgtgcgagaggaaatattccggctagaacccaagttagacttctattttgcgtagagctagggacaagttaccttatccagtcggtttgttggcttgtctccactaaagtgatatttgaagcggagatcgagatgatgcaccataacctctagtgggaatagcactgggggctcgaagttcagttcggaagctagtgcatcccggctttggagttcactaaaaggggcgtgttagaacatttcccagacatgaagggacataccatacggtaattgtaagtcgatcaacagttcaacatcttgcttccagcggctcaggagctggtcggtgacattcagttctcttgtcggccatttcatatcttccagcgttttctgtagccggtcaccaaagtatttcttcatctgttgtctcagtgcagatgccagtttgtctgtatagtcgacaagatggggggccgctccttcggcagcaggctgggcatccttcagtagtccgacgatagttcgtagtcgggaataaggcttcaaagcggcgcgtggttcggatgtaatgtcttccaaagcttgcttgctgtattgctgtctcagtatgaagtccctcacgaatgatcaagtgggcactacctcaattcctcggcttccttgagcaactccacatatcccttggataattcaagccgctggagcttctccatgctcttctccaaactccgtactgcctcatcactggtttcggattgtgtgatggccattaaacgtcggtcgatgtccgcttgctccgcagtgaacgcctcggcttgctttcgagtggcttcggcatggtcattagaggcttttgtcgcatttgagagtgcttcgctggcttccgctagctatttggtcgcgagtttgcatcagtagtgtttagaaagagggtcatggctgtgaggggcggtacctgcttccgctgaagctcctgttgcgcgcgtagactggacaacagcgaacctaaactctccagatcggcagaaacctgaatcttatcatttaaataatcttcgacccgagtccgctcatgcgaagataattccgtgagggaggccattgttgaaggagggaacttgaccgcggaagcgcaaggtgtcgcgaatgttgatctccgccttttggactgacgtcttccccagtggcaaccatgagcttttacattgtcaacactttgaataatgtccagtccagccaagaagcgaaaaagaaatggagaatcatcgcagccgacgcgcagtatcaagtcgttctttaaaggacagaccactgaacaagccaatctacaaggccccgatgtcactgagcaaaggctctctgatgaagctcttgcgcgcaagctacaggctgagtggaatgagcaggaaaatgcaagcactcctaccgatgccaaagcagatccacagatcaatccagttccatctacattagactcgcctgttttacccccggtagcgccagtgataccaaggaagagcactctctcattacagtcatcatctggtacggaggatacaatatccctttcgattcctcttgatcaaagcccccagaccttcgacgcgagtaaatacgcagcagaactgcggtcgcactgggcaaccgaaggcggagatgcttcttacgccttgttaacgagagcctttatcctggcaaatgcaacgaccagtcgaataaggattgttgatacgctggtcaactttcttcgagttctgatagaaggtgatccatcaagtgtcctgcctgctgtgtggctcgcaacaaattctatatcacctccatacgatgaattagagctaggcctgggagggtcttcaatttccaaggcactgaaaaagatatacggcctcaatagccaagggctaaagaccctatacgataagcacggcgatgcaggggatgttgcattcgaagccaagaaacgacaatcattcactctggttaagccgaagccattaaggatcaagggggtataccagtcgctgaagaaaatcgccactagcaaaggacctggtagtcaagaaaccaagcagaggatcgtggagaagcttctacaggatgcgcgcggcgccgaggagagtcgatacattgtccggacattggtccagaatctgcgaattggcgcagtcaagacgacgatgctcattgctctcgcacgggctgtcttatattccaagccagccgaggcagatttcgaggtgcgtccgtcgcatcaacttgcacgcttgaagaaggacgaacttgcggaaatctacagcaatgcggaagaaatcgtcaaggcgtcgtacgctagacatcctgattacaatgatttggtaccctgcttattagagatcgggcccacagaagagcttttgatcagatgcggcctaaacatgcacattccactaaggccaatgctgggcagcatcacacgcgatctgtcggagatgttgacgaagctccaagaccgagacttcagctgcgagtacaaatatgatggacaacgtgcgcaggtacactgcgacgagcaaggaaaagtttctatcttctcgcgtcatcttgaaatcatgacggagaagtatccagaccttgtgtctttggttccgcaaatacgaggagaaggcgtgtccagttttatcctggagggggaagtagttgccgtggaccgtgagaatggcgatcttaagccatttcaagttctgaccaatcgtgcaaagaagaacgttgaaatcggagacatcaaagtcaatgtctgtcttttcgcattcgacctaatgtatctcaacggggagcctttgctagatcgcccctttcgagaacgccgcgagctacttcgcagtctctttgtagagattccacaacacttcggctgggtgaagagcatagatgcgacatcggcagattctgagcctgtccttgaattcttcaaatccgccctcgacgtcaagtgcgagggcatcatggtgaaaatcctcgacaaccagcccggcgcgaataccaacaacctctcctccgaaacagatatcacaatcatcgagccatcaactccagcaacatccgacccaaccaaccccaaccccaaggtaaaactcacccgacgcaaacccctcctctcaacctacgaaccagacaaacgcctcgaatcctggctcaaagtaaaaaaggactacagcacctcctccgaaaccctcgacctaattccgatagccgggtggcacggccaaggccgcaaagcgaaatggtggtccccaatcctcctagcagtccgcaacccagaaaccggctccctggaagccgtaacgaaatgcatgtccggtttcacggacaaattctaccaaagcaacaaggaaaagtacgcgcagggcagcacaaacgtcatctcgcgtcccagctacgtcgagtaccacggcgaaccagacgtgtggtttgagccgtgcgaggtgtgggaaatggctttcgcggatatcacgctcagtcctacgtatccagctgctatcgggctggttagcgaggagcgcgggttaagtctgcgcttcccgcgatttatcggcgttcgtgaggataagtctattgacgaggctacctcgtcggattatctggcgttgctgtggcggaagcagatggagcggacggcggaggctcggggcgttggggaggttctggaggaggggatggagtagacaaggttatttgcctgttcatataaacaagctcatgtgaattgcctttcttggtactccatgcagcacctttgactgcaagaatagaccttctatgatctaataatatcggagatgctatatacatctcaacatccccctcactccgtaagtgtaaactattctcaatggtatatttccctttgaaatattttttgtcgacatggccccgtgtaaaccatttcgatatcttcctctctacgcgctctaataacctccgtgctagtggcggaatccaagcaaaataggcttcagatgacatcacatttgactttcagtcccctcacctctgattggctgaccccaaagcttcttaatctgcgacgcgaaagtgacgcgaaaagacgcgaccggattggacgtgaaaatgaggggttgactacgtggtccaaagaaaatagtcgcttccaggcgatcagagatagggaagtctgtgtctatgctgggatgctatgccgctccagggtgatctaaattaagatgtgtagtagggtttaggtgttgtggtaataagcattggacctcatttctcgaggttgaacatattccattcatcctgtgtctccttatatcaacagagatattaaacagtctcatcaagggcatggtgttaaaaaaaaatagggtgaacagtgagattgccgaccgacggcagacaatggcatagaaaaagtaagacatatgtctttgctgaaggagagggtaatgaaagacatgatagcaaagcatttgtaaagacaacgcctgtggatgcaagtccgggtagaccttcccaatcgagaatcatgtctgtcttcgagacagcgagcctgtacactggagaagagggcaaattacataggggatgaacacaatgtgtatacaacattattataacaaagtcgtcagtggggtttaagagggaggtagggcaaaaatgaacagagaagagaagatgtaaagacgttgggcatcatgggtgcagttcgccgccgagttgtaacgccagccccgtttccttgctacggagtcgagggctggagttgcttggaggaaccagggcatcgaagttcaatcgcttcctgctgctggtgagcggagtgcgagcagggttgcctggggtacggctactccaggttggctgcgccgggctcggggtcacattcacgaaatcagcgaaattgaattgctgattgggtgtgctgatgttggcaaacatgccagcgcccagtgtaggtgtcatgcctggcagcagcgcgtgctggctgggaggagtggaaggagggaaggccaggtttccgttgccccttgcaacccgagcaggggtcggagagttggcgaggtacaaaagcaaatccgcaccatcctcgtggttctgaggttggttgttccgggacaatcgcatatgttttgggggaggggttcgtggaggagaggagcctatgacggagctgatgtgttggaaactgtgtacaggcagatcgggatcgatctcttctgacggtctggggtatacaggcgatgacacctccgggattatagcctcagacatgaaggggagttgtgtgcgtcggctcggacggtgtcggttcatgcctggggaggattccggcagccggtgagaactcttccacgagacccggtgtaccttggcaggacgctcggaatcagagtcagaccgtaagcgctttcgactcgcggtcagcatcggctgcatgactcgagagttgaaggtggcagcatgtttgttgcgggcggatcgagggagctctttagagtaggtagaggcttggaggggaggagaggtgaacggggtctcgcagcgactgcgtgagaactcggatgaagagtcggaaggcttgtcagtctcaagaactggtctgccatcgtgctggtgcgggttcaggccatgcaatcgaccgtgttggtacttgagtttggcaaggcccaagcgatcctgcagactgagagaaacctgtgcgaagagaatccagggtcagtcccacatcaccaacgatatcatttggaagcattcagatgcagtggcaagtatttagactagtagccgagactgcatctcaagggatgcggagcctctttttttttcatcgcttacctgggcgatatcgattttgcggatcgttttttctgccgagcccggctgtgagggagacattgtgtaaggaacccaatcgaaataatcaaactaaacaagacacccctatgcaagaaaaaaagaagacgttttgaagagagtgtcgatgttggggtttggggggagtaagggcgaaagggaagggtgagagattggcgaattgcgggaactcggagaccaaatctggagaagcacttgaacagattgggatggaaagatgaaagaaacccatttttattcgctggacggtgttaaacataagacatggggcagaaatgtgtctctttgtttcttattttgaagtctcttgaatctgtctttctagatctactctgaatatgaactattccgtatgtacggggtacggggaagtgtgtactccgtttacaggtagaccacgacctctatatagtccatgcgatcactacccagctgtttattcttgttgattctttgatgtgagagggtgctccccaattgagctccatcacgcactttttatactccatccaatctcagggtcttctcccagaacaagaatgttctttttccgattcggcgatctccatagaaaccagacattcagccacagattgcgatccacttggactggggaatgaggtcgtcactcccctgaggtatgccctagatcgccggatgcaatttatatacttacgtgtacgcaatatccaattcaatcccatgcgaatcgcaccccatagcaagaaagaaaaacgccattggtattgaggctgtgagacggatttagccatgcatgcagccctgttatcaaccccgttaagattctaatcttggaagagatgtgggaggacgattttaacaggagccacctacgtaacgccgtaaatcaagagtctccagatatgcagcataacgtcaggaagcctgtaggaaactaaaaagtacagatggccatggacatgccgtgttcatagcccggtatgtgagcccctcgcacgctccaagctaagaacattagcgatccccgatccacagtgaaacattgacttaaaagggttggagctgagctgataacagccttgggaggcataatgcggtttgggcgcggattgaggtacgtaatgtcgatgtagttaattaatattctggaactagagggggaaatctcagatcggcttttctttctttcatcttctcaaatcaacttcattttgaccatatcaaccagaatccatcccctttccccctatttggtgacttgcggggcgacttgtcgtcaaccgcaaacggttaccctgttcctgacaatttaaccccgtctgaaaaaaataacatcggggcagcttcgtccttctctctcctctcaacctcgccatgccgttcttcaaagacctacggcgtcgatcgaaggccacttttcacaagaccccatctcatagtgtggaggaggtctccgggaaatcgtcatccacaatcgacacttcctcccacaactccatcactccaccgtcatcaatcagaccaaccctttcaacccctagtcttccagcactcaatgagtctgaaaccaccagcacagccagcttggcaccgccgtcacagcgcccggggcctttagcgaccggttcgcagcgaaacagcgttatcgtacgtccaccctcattccccgcgacagctgaccatactgaccctgatcgcttgagaaaacagggtagcagctcgtcctcggtcaatggcacgtaccgatcacaggctccggtctcgccttatgcaccgagagtggtgtctgtggcggataattcatgggtatgtttctctgtccggcacgaattggaggccgatagtgttccggtgacatgaaatcaggtatctaactatcatgcaggtcaaccaaaaagtcctgctcgtctatggtcaaatcaacgacccaaggcaacagccgctcgacggaaacatcaccgtctatcaccaccaagataatttcccgtcgactggctggcccgtcacggcatcgcattttaaagtccttgttcacctagttcccggtcctaatcgccttcgctttgattttgtttcgccaaaattgtccacggggagcattcaccccgccatccactcctcctggctttgcattaactaccttcctctggttaacaaccccccattgcagctagtcgttctcctggggaaagattcagacggcacatacgatgcagtaccggaaagggtagagcgcgaaggaaacgggttggaaatggccattcgaaagtaccgcatggctgcctatctctggcaggccttcactggcgaacagatgttccgcaataatttcggccgacgttgtttccgattcgaggaagagtggcagtctggtagcttgagccgtcgcgactcggcccaaggtcagatgcggaatgaggccaagattcacgtagtccgcactgagaaaacagtcgccgaactccgggatcttaacatcgctcagcagaatgggaaagccgagaagaaagacgagttgttcgccattgctaaagacgcggtgcgaaatcatttccggccccaggccggccagaagcaatacgtctccgttctcctcctcgattctcattgggataccgaatctcagatgatcaccggccatgcagctttaggttcggctgacagcgatatcaaaatggctatatttgggtctcattgtctccaaagctatccatcgtgtctggaagaagtcgtggatgcgttctcagactgcacccgcacggataccaactacgtcgccaatgactgtggtgaggcgggctccaattgggagtcagcaaatctgggcatcggggctcacatgcacgaggtgggccatctcttcggatgtcctcaccaggagtcgggcgtcatgcttcgcgattatgtgcgtttgaaccggacattcctaacccgagagccgttctcaacacgtacaaaggcacaagggttgaaggtgtgtttgcccaacgacgagtgtagctggcaccgcctcgatgccctacgcttccgattccaccccagcttccgactcccaagcgatccttctcccccttcggatgatagcgtccacgtgtggccagtcgagaacggcaagatattgttcactgcctcatcggggatagaattcatggagctatatgccgagggtgacaccctctgccacaacttcatcgagtacttgaacagtgagtcgagccccaacggactaccacgacaagttgccgtgacggagatcgagcttcgtcaacgtgtgtatggcactgagaaggaaaagaaaaagaacatccgtatggttgtctgctctggtgcactgggcagctatacggttgagaacattggcgatctgaaatcgaaaaattctctcgtcaaattgcccaaaggccggtctggttttaaaagcggcaaattaggccagtcggcgatggaaggcagcgaacccgagcagttgttactggaatatgcgttcatcaattcaaagctcttgacatcgatcaaggtctaccatggctttgcgctggatggtatcgagttctgctacgaagatgcgaccagtcagctgtttggcaagcggggaggcaaacctggtggtgatgagttcgtcctggatacccgacgtggggaagttctccttgggttctatgtccgagctggtctctggattgatggaatcgagattctcacgagtctggggagaaaatcgggtatctatggaaaccccgccggtggctcagggtacgtatcccctattacttttctctacatatgaagcatgctaaccaatgtgcaacagccacactttaatccctcccttgggctacaagattgcgggaatctctggttcctgcgcatcatggattgatggattctcattgatcatccagcactgatagcaattgtccaacttttctttcctccgtctctgagaggtcctcatgcctcgaagctagccaaatcccggtgaaccatcgtacagcatggtggactgcgaatgactgcagggcatcctcctcgtccatctcctacaactactaagccttgccttttcttgcatcttttaccctcttttcatccctctgggaacagacaattccgcgttccgcaactggcccttggctactatatacacgaggttccgtcggattttgtttgtgtctatatgttttcttctatttcattttctgtcacacatcggcgtcatcggcgtgttagggtcgcatgtatgcatgctgatattttcttcgacgttagtcccgggtgcatggactacacttattggtaatcatcgagcataccgatggccacacacagcaccactgaatcattttgtaaaggggcatcattcatattggttggatagttcatatagagtaatgtcatgaaaccaccgtcaatgttcgagaatgatccagagtaatcctacactttgtaattaagacgctggtaaatatccacagggtagattccgaattctcacgggcggtcctcatacatctgtccaaacttatctcctgacaacaactcgaaagagacaaaaaaaaaaagaggaacaccggggtcattgaccggaaccctactacacccgcatggaagcatagtactaagtcatgttcacaattacgaactcaaatgacccctcacaatcccaatatctatgattcatgccactgtgggcgaagtctctgtggttaaatccacagccctagaaggatcatacgatctacattcgatgtagcttattatgatcttcggtgcatattcattcctagacagaagcattggccagccaatccggggagggtcgttctccccgttgatccccgttgttgtggagtggaacgagagacggcacaaggaacatatagccatctagccatcagatcaccaatctcccgagagagagacagggactacctaggtatatcggaacctcacgccgattgtcggcgccgggaaacgtttgacacgttcgtgggtatgtaagatatggcggaagggagactagacctttcaacgcaacatgctcaccatatatcatgatatgaatattattgtgtggccccatctgtaaaattggctgtttcatgtcggtatatatattattaaagggatactgaatgaagccctaggccgaaggatgttcgtctatggatagaaagaataatattttgcctagctgagtagttgtgtgaacacccgccgaccccgctataccgcgtgcgaactttgtatctagtttccggagaatataaacgtgccaatcataaggccggaaactcgtcacaaagtagatatccacgttttctaaatacagctccccagccaatcaacgagctttggccctgtgctttggattttttgacacatccccattcagagtgccatatgcacaacgtctatatttacgcgcatcccattcgtgccgacgctgaaccggggtgggaacccccgtgtacatgtacctcccgtcgagaatggggaaatgctcgtggcggaaacgaagctgcgtaagctgtgccgtcattttctttccagagctcggggtgcctgagctcaaggtggccagaccgtttgttggcctgactggctgtttgctagtaaatccactgcaagccagggtagatcggcccctctccccattgccgatccccgatttccgattttcctatatattatgtggctttgggtttttctcttggttgcccttttgcgctaggcgtgtgggttttgcagggggggggggggggggnnnnnnnnnnnnnnnnnnnnnnnnnnnnnnnnnnnnnnnnnnnnnnnnnnnnnnnnnnnnnnnnnnnnnnnnnnnnnnnnnnnnnnnnnnnnnnnnnnnnnnnnnnnnnnnnnnnnnnnnnnnnnnnnnnnnnnnnnnnnnnnnnnnnnnnnnnnnnnnnnnnnnnnnnnnnnnnnnnnnnnnnnnnnnggggggggtccatgggcgggtcggttaggggagcttgatacactgctctgcacatgcacactctccctggacgacctctcaccagaacatcgacagcccgagaatgaatttccctatttagagcagatcacccgcatatacaatactgtattttatacggcgaatttcaataatggcagctccgagcccgagctgccaagcctaccgatccatcccccggaaaactattcttccggctgagagactggtagtcctccgtcgaagctgtttatttttatagaactattagttattggtgagtattagttactcacggtggacccgaagccacaaatgcgggattagggtacagagctttgtacacctttcgcactgtgcggggccaacagctcggcgagactcgtaaaaaactcgggtcagacctgagatgccaacgtgaaatagaggctagagtcctaacgccagaatacgagcgcggtggagatgatcatatgtgctacataagtcaacataagtactaattaggtaactagaatttttatccgtggactcgagtgtctcccgagctagaacccgcgcttggccaaccgctcctacttcctttacagagaagctcgattacttacggagtatctatgtgaaggatgcaatcgctaaagccccatggaatttacagattaaattgcataacgtacggagtactccgaggccagatcagccaataatcgactgtatgctctatccagctattgtttccgattgattccagtgaaatgatgaagacacacaaattcgcactccagacggtattttctgaatttctttttttttctcaactgtggatgtccaacgcagcgtctagcccgtccatttccccccctgttgcatatatcaccaaaaacatccccttatgacggcgtggctttatgctagtcaatctgatcttggggtgatttaagtggataaggcgttcgagtacttacgctgtttgtgttgtcttgaacgctcactagcctcatacgtcagactagtactttactacttttagaaacggatgcacggattccgtgctttagcttcaataacttaaattgagagctcgagtaaggtacagggtacatacgggtaacggtggacgttgttcttaatgcacatggtaaatatacttacagcacgtgctccactgatcattcaagtgcgaatcgagccatattacaggtgggtaggctttccagcaatggcatgtatggactagtattgttttgacgtggtatgtggctgtatgcaaccccacaccagactttacattccataccacctcagtatgtatggatcaaccagctaccttggccatgatgaaccatgttggcatggaaatgggtttaaacttggaatatatagttgacatggtcgctatcgttctggcgcacggtgtgcagagtccctcgtcaacggacccgtgtctatgagccgcgggagaccgatgaaatcatcagcaatatttttttgggattttttgggaagcaccaggagattggattgatagatctccgggcccagtcagttgattccggtggaaaaatgtatatcaaccgaacaatatcagtttgagtgtagatccggtcgggccggccacctatcatagttaaccgctagagattaatagttccacattcctcgttcgcggctgatgtactttgtatgttgtatgctggtatgaggtcaagattcagattggatagatgtggctgtagtgttagatgaatgacggttataagattttaccaaaggaccaaagtacgtatgacctgaatggtatgcataactctattttactgctaccacaacaacatacttatttgccatccaagcaagttacattacctaataagaacgggagatacttctagggttccctccctagagtatccgtggatctgaatcgtcttacaaggacctccatactacgtgttgctaatatatgtatgctgaacacgggggttatatattaggaaggggctatgtctcatatagtactccgtatagacaaccgtatgaatctgaaatatccatgttagaatagaaaggagaacagatgctctgtatataactagtatatatatataataactccatactccgtacgttgaatctacctactccgtacctagtgatatatattgtcatacggagtactcgaaatataatacacacccgtacaatacgtaaatttgcacttcggtctcgctccaatgtcgttttccccactatgtccgcacggctctccggtaactgccaaaggtctccataatgtatttcgctcgaccaatcattttattcgaacaaatatattgtccaatttctttagcagttcgactcttccaggagatttcaaaaaaaaaaagagaagaaaaataaaataaaataaaaaagcctcttaccagaagtggccccctggtcttatcagtttctcccaggtggcgacagctttcctctctctctcctaaaatcttccgagcacatccaatggtttctcctttgtgttaagtccactgtggctcagtggatgacagtttggtgggatctcttatacatctgtcattggagggcctcattgaccgtaccatctttactcttcctttccccatcatcccctcccttagagcattatcccctccttccacccctcgtctctccaataatacatcatttcctccaatctcctataagaaggaaacatagtccattccaaaattggtttggatcggcctacactctatctgccttcacccttttgatctagtcccgcgatcttccgtttctggcgtatttcatttccacacccatctagtcttttcacattcacatcagagaaaattccctagaaccccttgttgcacttcgcacaatctcgaattacctcgaattacctcgaattacctcgaattatccacgacgtacgacctcatccgaacgctttccgaactcgatcaatccacgtcgtgaaaccgaagaccagctgagcacaaccatactggcaggccacaatttacgggtggccataatctgtttcttgccttcactatccaagccaggcgaagcattgataaattaaataatgttcaccaaccggtgagtttgtcgccgcttaacttggtcaatcgtataatggtctgttctaacgttcaagttcgcgcaacaggaacaacacccagaagccggatggtgagttcatcagtcgcttccagcagacattctcagacattgtccctcggcgggacagcacgagtccgcgcaatgtgagggcaggtgaacctttgatggcagggtatgtacattatattctaccaggtaaaatgtccgaggtcagaaactgacattcttgcatagtatgcccgagaacaacgatgtgaaaatggagaatcatgatgtcaagttacccatcaccaacaacgaccgcactccccgaaatatgcatgaacttggcttgacgccctcatggatggaatccgcttcctattcaatgatgcctcttgccaacccgcattcgggcttttatactccaacctcttctggaatgggtgccatgttccataatcaagcgggcgatttgcataccccaacggggatgcacttgatgaccccgttggcgggcatgccggctgtacacaatcaccacagcactggcttcgagccgttccacccgggtttcttgaatccaatgaatgacatgaacccatacactcagcagccatcatatgcgccaagcgcattcatgcaccgcgacaccggatatgacgccatggatgataccctcgatgactcttctttaaatgatgtacgtgttgaaacagcatccaatgtaaccgcctctacggaattttcctctcaattggctggtgacatgtcatatgccaagggcgaaaagtgagtttaatgatccaaatagtaaatgtccgttcaatcctaaccaggttcgcactcatagattccgcttcaatgtttctctacgagcaccgaccgccatggtgaagactctaagtgaaattcccgtgacctatctcaataaaggccaagcctacaatctctcagttgtcgatacaagcccaccaatgctcagccacgaaccggtccgatacagaacattcatccgaatttccttcgaagagcgagaacaacgggcgagaccgtcagcatgttggcaactatggaaggaaggccgtggtaccacagaagcccatcaacggggcgggaaattattggcagttgaatacgtggatccattacaagggggcagtgacgcacacaggaatcgacaggttcaagtcgagagtatgtcagttgacggcttctgcgtcacttggactgccaacccagcgaccggcatatcagattgcaatattcccgtgcggttcaatttcctttccacggatttcagccactcaaaaggcgtcaagggaattcctgttagactgtgcgctaaaaccgagctgttgtccccggacgaggagaccggtctctcgcacgatccagagctgtcttactgcaaagtcaaacttttccgggatcatggtgcggagcggaagctgtcgaacgacgtcgcgcatgttaagaagaccattgataagcttaaacagcaagtctcccaggcagaaatgggtggtggattttcgaagcgcaaacggggaagtaatttctcgggcacctccaagggatcggataattcattgaagccttcgggccacaagcgaacttggtcgttgggatcggaagatatgtctccagagaaagtctcgttacaggatgatctccaagccaagttggctacaatgcaagaaatgttttcatctactcgcgcagtgagcgttttcggtttacgcggtgacaacttcgacgatccggacctatatccgatccacttatcaggtgatagcgattcctctcagtatgggaatacaagtcgttcaagcacacgtgaattagagtctatcatgccttcgccgccgaacaccaatacctcttcttcgaattcgccgcctacccaggcactcagattaggaaaatgccccaccactatccagagggttccttccggcgaccaaatctcaaggggtttcatagaggccatcggtgtagacttgacctaccgacctccgtcggaacaccctctcaagccaagtgagtttctcgcgcgcaacccgtcaatattttcgctaattttcttcgcagttgcatgcttctatgttcgattcactggaaatgtgacgcgctcagaggattactaccgtgcaatctatttgacagaacgcaccgttcgagacctcgtgaagcaaatcaccgagaaatatcacatcgatccgatgcggatctcaaatatcatgcatgcccatgagaagggcctgcgagtcatagtcgatgacgatgtggtccgccagcttccagagggtcaagacatgatcgtcgacatatccgaagcacccggcggtgtttctggcacacccgaatctcctatggagatcaacttaacctattaaaactgcgtcacctacatctcaagcacatgccccggcatctcaaactcgaatatgatgcaaaagtaaaatcttcttttcacatctcacctcgctagccactgtggtctcttcactctggtctgccgcacgaactttccacattgagtgcattcttgcactcatctttgtcgtttcgtgttttcatcttctctaatgggtcggtactttttttcttctgggcgctgaacacggggataataaacgagtctccgagcaacgataccctgttatattatgtttttttgtttttgacatcgttgtgttgaagcttagcgttgcttacccactacgacggtatatgagtcgatgggctatggaactcttgatatatttgtcttttatggttatcatttcgatctggtcgagggccgagcatacgacgttgataccctgtttacctcttttatttccaggtcttctcgtttgatattagccatttttttctttttcttttttcttttctttttgttggttgctggtctgtaccggtcttgagcgttttgactttttctgtgatgtctatctctacccatgtcttatgtcttatgcatatatcattcgatatagatagtctcctgagggactactgaggatgggactgcaagtcagccactcggatgcaagtgctagaatacgatgaccttgctacctcaatttgatcttccatgtaggagtcgtactttgtcctaccttgaacactaggtgtctgagttgttaaactctttaacaactacaccagcaaagctgcagcagccactcaacccctggtaccttggaagactacaaccacatttggtgaccagcactcggtactgaaagttgccaccttaaccgagaatgagaaatatctaacgcttacatagccaccaccttccccccttccaaagtgggccatgcaatcaaaaaagaaacagactaacgcctcacggcccacaagtgattccacaccaacccagtggaacacgcactgtggctttcccattccaagccataaaaaggtaaacaaaatactacccccttccccggttcccaggaacctgggaactatcccacggctggtgaggtcatacctagttttggcagggaagatcgcctggaccgctgtttcgggtcgacataacatcactgattggatgggtcatctcccgtccggttcctgtcagccaaccaatagcccaggtggcggacggggccgggagtcgtccctgggaattgtaatttcggtacaacatagtaactccaaatcgggagttgcatcgaaatttccagatcgagaatacacaccccacgcttggatcgtatggtacgtatgtttgtcgtgctttgaccttttcatgagtagcactagttaggaaatcggaagcggaactggagcaaaaagacgtcacgtacaactctaattgtgtcaagcttatctaatcttaagcgcgaagtctaactatgtaattaatgctgaagcattcctttcaagactagctttgagaggctatatttcattgccctttgcggttgacgtcttctgataacacggttactttcactctgtgttgaggacccgcaaacacggttgtattatccgtggctcctatctctttcccaaatactaccttgaaataagcgagattgatttcccactatcactgacgctgtacggggtacggggtacaagtgtgcatgagagtctgagcgcctgccgtcataatagtctgagcgcttgcaatgctgtggatagctgcagatgctgaatatcacttcctaaagtagagaggtaatcggcgttttgtctgtaatgattggcctgcgcaacaacgatatagttgcgatggaggcttatgatgtagtgaggggtgaattaactttggtggcaacagagtggaggtggtctacggtgtagtacatccggtagccgaattaggccgtatatcaaattaaccttggaaccattattatttattacgtatgtaaattacagacccgccaaccagaccctggcacttttacttcaactaccgtttactattttggaccctcttatgatttcctattttaaccacacgctcacctatatagctgcagggcttgatgggcttcatttgttgttgaggtgcaaatggtaggttatttaggaatgaagagtgcttctgtttagagtatcatgctagcctgtcacttgctgccacttagattccaggacgatggatggacggataagaagcctgacaggattaggaacttccccccagtggaagatgtggtatcaatgcgcttctgtaaggcctcggaatacgcttgcatagcttagacttccagtctcactgacggagttgacttcagcaaaccatctttgcggatatgacagcgttattgaacgtacgtagatgcatctcataggtgatcatattgcctaaacaacattgggcactctagttatattgctgctttcttcggagaatgatacagcgagaagaacttgtctttgcttctccgtgcaataagtagattccaccgtgcactggagtcatcgctgtttgatatgtcttcccttgtagcaaagaaatgttccaaaaatacatagtatcctcagacaatgcatttaaagagctagcctgagcagatatttcatgattgaattaatcagtagttcaatacccaggcgacacacctccattgagcatcatctgggcgcagtcctggtgctcaagtccatccaccgggtaagagtgaggcttgcatgattttcatccagggttcgtatctccaacttccaagagattacatttatcacaactcccttggtcggcttgtttcggtatgcttgtgctagagcaataacactcaatttgagaggtgaagatgtcgataaagcccaggtcactaatcatgggcccattttcgcggtacgtgttactacggctctttcatgcgttcacaagcacaggcccggagacatggagcaaattcgagcttcagcagaatattgtcatcataacatctttcgggggatctttttctgatgttttgttgacgagggattgtaaccagggcggggctcaggatcagattcgaccagctcctatctccgtatagagcaatgactgaacggggattccgaaaccggtccttagtaaaaccctctcatcacaagctgaagattgaacgaaatggaaaggtagaggtctttgaaggtaccgatatttcagattagtagagtgacttggtagcttagtgcttttccacaaataaagtcggaggcagatgaagcagagatggtattgcggtaggtcgtaagaaagccgaaatagcagcttgatatctgcgtcatttccggtgcggccgttcgagaagttccaaaaatcaatcctagcaaaaggaatacagcagatgatgattgcctaatatcagacaagcaaggtcgactggtgataagtgctcagagatcatctataatagctagaaggtcggtcaaggctggtggctttcgcgtggccatcctgttgcgaaaggtatcccctgtgcccctggctgacttttgcttcacttgttatctgacgtgtcagactgaacggcttagtcgtaggcagcttccatggcctttgaagtatcatccgaatttcttgaccttgtaatccggatagttagttaactaattcccaagcgagctgcgcagcgcagaacacatagtaaaatcggtaaattataatgtggtattttaacaaccaacgcttttgtttaatttcattactgtccgatagcaattgataagcattgggctagaaggaaaagctcatatagataaccgttgttgagatatcatgttgtaatctatcgcttttactatgtgttctgcgctgcgcagctcgcttgggtgcgcagctcgcttgggaattacgttagttacattgggtgattgcttactaactggaagtacgatccatttgagtaatcacacctcggacctcgggagcaggaccctaagcggcggcaccccgatcgggaaactgacatccgtggtcaattgctatagatatccaaaattcatggctatagatttcacaattctagcattttaaactacttctacttggactcttgaggcacactttgatacacagcacaagccatatgatgtcataatgcgtcagttcctcagaagtggggctgaaataaattatttccactttcaatttttgtctgcgcgggtcgtcccgctacgtgaccgcgtcgggtctagggtggttctggttacataccgcacatttcccgggtattttgaaatacgtaacgtctgtatctgtttacactagtattttttagaatacaattatacaacgttggagtttgccactctgctctgactgatgggatatctcccggctgggactctgattggaacctatgcttatactagcgggtagtagcgggtgtttaacagtatagacgttgcacttaatctgaatgtcatctttctcatagtcaaccttgacattatatgtgataatcatgccctatgtcgtgtcaccattgcccctgacttgatctgccctgacaatatagcatcgatcgtccttggcactggtatagggctgttctcggtcaaaatagaaccccattgtagatttacgaataatcgacaactttcgaggctcaagtgatatcccacttcggtacttgaccttctcgcagtgtctgacctaaatctaggttgtcatgccaatgataatcgttacttcaaagatattaaaagccaatatccctgcaatgttttactacattgtcctctatttaaacttaattcgggatctctatggccataataaccacaataaaaagcagagctatacctgtttacctttgcagttctgttaaggtggcacatcgaccattgtctgtgaaacaccaacctcttgatagaaatagttctgttcttccgagagtagtagagggctggttttgagttgatccccggatatcaggtcttttactacagtctacggcatgaccctgctgaatgaaaccccccgatgttaagtaaacggcctttgtttgcatccaatttagtatatgaactaaattcagactgtctcacttaggttgtacaccgatggttgccggtacacctagtttaaggttctattcgagtcacacatggaggtgtagtgtccaaattatatcccaggagtggtgccttccagggttgtcaagtagctcactatagccgtaaacggcagtcgtgacttccttgtatgtttgccctaaatatggacagcacgtgttccccccgttccttcctgaacagctggggactttgtttactatttcttcctccagtttcctctttcttttctcctctgttctctcctcttccactttacgttcgttccccttgttcctcaattgaccctcgattgcttggttgttccatcaagtgatcacttcacattcgtttatcaacctccatattcgccaagatggtagcttggatgcgtttcaagttgcttctggctatggtcaccgctctggtgactatggctgctgcttcggctggtaattatcatggctgataattactctatgatcacttactgaccttgttgcaacagaatgccaatacatcgagacggtctttcttcaggacccccacactggggagcagtatcagtttggtgaaggcaagtcaaacctgctatctgggcttgcctagaaatatgccgttactgatcgattttcacagtcaacgttctgcctcgggccttgtttggtcgtgctattcaagcttctgaactgagtaaatccaggctcttgccatcctcgcctcttttctagaccaaaaactaacttggtactagtcactgtcacggttacccataccacctgcgatcctgatgaatcgaccacaactgtcaccacagatgttccttgtacgactgtccagtctaccacacttctcaccacggagattactccagtccccgctcaaagtacccctgctcctggtgttcctcagtctactgtgcctaccacctcgtcaactccggtgcctgttaacactcagacttccgtgcctattgtccctagcgctacaagggtgaccaccaagtcttctgcacctggcaccactttggtgacctcgcagtcttcattacccgggaccgctcagaccccagtgcccagtactaccaaggtgcccattggaagcagccctgtaacaaaccctggatcctccacggttactgccactaccactgagtcggtttcttcttccagtcctaatgctaccagcttggctcctatccctgtcactaccgagatccctggaactactgggtccattacatccactcgtcctaccaatgtggttcctatccctggtactactggaattgcttacacaaactcaactgttcctcaggctcccaggacggtgactgatgtgaccaccttttacactacgtcttcttgcctcaactcaactgagctggcccctgctccggtgaccactgaaatcaccattaccgttgaagttccttgcaccgagaccaccaagtgtgtcagcaccaaggtccttaccaccggcaccctgccggccttgaacacaaccgttcctgcttccatcccacggaccactacgaccaccgagattcagtcgaccatttctgtccctgtcccgattaccactgaggaggtcactggcacggtcgagatcccttgtaccgggaccaccaaatgcaccagtactaaggtgtacaccaccatccctacggagactaccactatctctgtgactccagtcccgattacagctccacagcccaccactgaggtggtgactatggtccagccgactgttcctggtgcccctgcaaaggagaccaccgaggttgtgactactgtgattcagcccactgctcctgctcccgtttcgcagggcaccaccgagcttgtgaccactgtgaaccagccctctgttcctgctcctgttccccagacttctactcacgaggtgactaccgagatcaagccgactgacttggtcccacttccgcacgccaccactgtcgaggctacttctctggtcaaggttcctgctccttctacgcagccggctaccacccaagagaccaccgaaaatcaaccagtcgctgcggccccgaccactctagctacttctactgtctctaagcctgaggttgagagtaccacaaccgagtccaagatttcggttgtgtctccccaacagcctactcacacccaggaggatactgtcctcccatctcctcatggcacttcttccagtggtactcactccgcttcccctgttttcaacggtgccaatgccgctgcaatcatggacagccgtgtctttgccatgagcattgtgattatgctctctcacatctttcgcttgattctgtgagaacgacatacactcttaccgtgtgacgaggcaagtccagccatcttctgatgtagcaaggatagtatctgatgcgatgactgtgttcgtgatggaatttgaggaacccatggtgttgatgggtggtcgtgtgtttttatgggatgcaactggctccccttaatcttgcaaattttatcagtcactcatattctagttgaagcatagctttcctaatctcacaaatgttcaccatggttgtgtctaatgataaagaaagtatcctgtagtctgtaatctgcaaccgaatggcaactccaagggacaacatagctgaccgaacagtattcgggcagttatatttcggctgtgaaataatcacaatgtacagaacgtaatacgtatgctgtgagcatcaaagcattgaacataacacatctttatcaataaacaacggccagtgtgataacctcacagaatggatgaatgcctaatatccccaaatggggatagtagcttggctaaagccagggtatctcagagaaacaaggagaatgcataggtatgtgcacatggagtatacacacaggacagacgtgaatgggtacagatgtccctaccccagtagagttcaaacctcaacctcaccaccaagagattcaatgtctcgcgtcagagcacaaatccgacatccatcgccaatcttgtcccgcaggattcttgccgtcgtgaccttggggccaacactgcgagatgcagtggcagaccgggtctcgtcgactggagacatggcccggggtgtaagatcagcagatcggtcacggctgtttgcgccggattgttgtggcgtgtctgagtgcaagtgggatagatggaaaatgtggccacaagcaaagccaacgagaatttctcgctctgtatgggggttcttatcagcattgtctttttggatgaaaggagttggggtcaaaatcataccgttttcccggaaggcggctttgcagcnnnnnnnnnnnnnnnnnnnnnnnnnnnnnnnnnnnnnnnnnnnnnnnnnnnnnnnnnnnnnnnnnnnnnnnnnnnnnnnnnnnnnnnnnnnnnnnnnnnnnnnnnnnnnnnnnnnnnnnnnnnnnnnnnnnnnnnnnnnnnnnnnnnnnnnnnnnnnnnnnnnnnnnnccgggagggggtttttgcgcccgccacatcttccctgtccagggcctccgaattttctcgcaccattggtttcagatatatgatcttgagctggggcattcattgtcgttgccttcttggaatcttcctcgccaacctcggtgacatcaaacttgattccccgccgctgacctttgcgcagcgagtccatcccaagtgcaacttcgctttgcataaccctagccgcgccttgactgatactagcctgcagatcatgctcacggatcaagcgggtgaggccctctcttagaccttcaatctctagcccgctcgggatacgacgcacaagctttatcgggtcgatggccgtcccggcctcaacgagaagaccatggatgaactttggcttgtccatggagtagtcaagcagatcctcccacagatcaggatcgtcctgtgattttgcaaatgaaatggcctgtgaaacatccttgagatccgatagaatcaggttcaaggctcgctttgtctggcccatcttggacaagagaaaaatcaactctggcgtgaatctgtggttttcgcagatcgatgtggctttctcgaacgaataggatatgcttgtttggaggaactccatcagtagaggtcggtcgtagtcggcaaatacctcaacagccgtatcagcaaagttatcaatcagggctttgccttcatcagcagcaagcttgctggctgcatcccgagcatgcgttccacgtcctcttctgggtttatgagcgtcctgcggtaatgattcacctcgccagagcgcacggagatagaaataaaggaacaggaaccggtccgcggcgaccaactgtgataccacggtatctggaggaacaatgcccgtgtatgcttcccttacgaggagtcgcgtgggctcagaagtcagctcctccagttcgaattttgtggcggacttcatttgctctttggaaacgcgaatcatgatgaaggccggtatatcatcagagactgcgtcgagcaatcggtgttcccgaaccaaagacatcgcagcatctccatcttgcaatcgaatgtagcaacgcaaggcttcgcggtaatgccctcctgctaggaacaacttggcgaggcaatctgtgaggattcgccattcctcagaaccggcgcgtaccgatccggatttcagctgtgcttcgatggattccgtgatcacattcgcatcaaacaaatcggatggccatgttccgaccagttctttgaatttgaccaaatctcgtgacacgtagtgagtgagaatgacttcgtagatctgacaagacaacgatggatgtaaatcgactggaatttttggagttatctcatcaattttatcctttttgataaagacccacgcccagtgttcccattgtgaggcattgcgaatgactttgccacaaatactcgcagcatgaatccacttctcttcgctgacaagttggttgatccagagttccccaaggcgagctttttcttgttcggcagccgaaacttttcttctaccagcggtcgtcatggatgatcgatcatcagcgaagaagtcacctaaactagtttgcgaccttgcagcctcggacataacgtcggctaagtcaggtattgagcctgcagcttcgggatgttcatcgacgagacgccatgcgtcctcgtactggccatgagaatcaagccaggacaaacggtccgcaagatcccgttttactgcaacaacacagtcatatgggctgtggacaaagattttggcaccaggagcacctgaaacttcctgtacctccttcggaaggggctcctcagtcgcgtagattttggacatgaaagagggagcaaatctaccagatcccttgtccccactacttgtggtactgcggatactggcgccggagctgaaaagccgcgcagagtacatagtagcatccaaaatcccatgcccaagagccccgagggcaccgcgctggacgacctgtccctctggggtcttccacggaggcaagacacttagatgataatcagatgccgagagaccctcaaagcggtttactgaaagcgtatcagcgctaatttcttccttggtctcaatgtcaatgacacgaagttcaggttccaggcccttttttcgattgcgggtcccactgcctcctccattacttgcagtttcgccttcggtctccaaatatgcaagaatgacaagaagacgaggcgtatacaatgagatgccagataccacgcagtctgttcgtaatctgtgttcaaagttagcgatgaacgatacaatctgtgagagttccagctcacattgtaacaacctctgcagagcccaatttctctcccttggatgttttgcttgccctttcggggtagacatcaatgacccaaacagttcctccccacccgacgacaagcttttccactttctcagtgggcaccgtcgactgtacctctggacttgctggacagtcatttggatcgagatggtcccgaatgtccagagcggactggtcgatccattcagcacgtgccttccaaacattggccatttcgtcccagccgggacgatttggacgatcaatatggctgattcgtttccaggcaaattctgtctctgaagaatctagatgtaaatttgaccgcataatcttaatgccttcctcgttgacccaggccacgtaatttcctgacaatgaccatttaattgtgcttatagtcccttcgccgctgtggataatcgtgtcttttccactagtggctgctaggcccatggatccaagccaacttgacgccgttgcggctgcaccccccattgttgtagaattggaggtcgccccaatacgaccaccagttgtcaagaccaattcacctgctcggccaccagacaggaatgcccggtcattcttgtattcgggagacaaagcaatagactggactgggcggccaaaattacgcaatagcacatccttcgggtctactagcgatgagacgcacacgtggccatcgattgaggaggtcccgatgtaaatcgagttcgatggtagagggaggacggtcgaatgattacccagttttccttggccacggatactgccagtgaatgttgatgctcgcgttggtggtctgtattcttctgcagtctgcttgctgaagagctcttgcttgaagttcggaaggggaggcggacatggcgatatcgatattgaggtgacactggctgagtgtgcatgatatacacggacggattgtagaagcggtaaggacataacatgcttgacaaggtcagctcatatgtctgcgcgctggtgtggctaacttacgacgtttccgttgtgcgtcccgacgatctaggtacctcgttagctcattatagtataggtcccgctaaggatgcataccattttatcccctgctacgaggaacgagcttgtcgcatccccgttgcgatatactgatcccaggtgcttcgtaaggtatgcgtacttgaggcggggttcctcgtcctcgtcgtccgagtcatcctctccttcggcctcttcttcctcggcctcctcttcttctccatcatcgctgctgctagagctgtggtcattgaatcgttgctgtctatcttgggcgccttgagtcgtgtctgtaggtgatccggttcgtatggatgtgtcgtgcttgggagtgctctgaatggcactttcgtccggcggtgtcgcgccaggcgcgtccatggcaaatccctctcacacctgcagctcccaagctggttgaagtggaatgcgacaagctgaaacgggatcctgtggttctacagttgagccggggtaggtcagtgccccgagcttgattccatgactaagcgggctattgggccgcgggcttcaggacgatgtcatcgaccgagctattcgggctttttgatcctcggatacacacacacatacaatgtttgccaggccatatgtatgtttaaactgttgcaggcgcccaatttcacagtttcctacgcgaccgcagacccaattccttcatgcctctcctagactagcacttccccgacggaaggatttcttttcatccaatgcccacttgaaacaaaaacagaacgccgatgaaccaattgaatcctctccggattcccggaagcaacttcgacggggtcctaggtcaccagcagctcccacttcattgcggcgggtagcggtagaggcacagaggtcgaaggatggcattatctccaaggcgctcctcaaagagcaggggttatatcggactaaggtaggcatgactgtttcttctacgatcttcttccactaattatttatcgctagacagttaccgcctacgccgtcgccgaacaatttgacatccgcaaagtaagagatatcttgcaagaacgaggatatgaaccggacccgttggaaaccgggcttttcccgcaggtcgttcatgttcagatacccttagactccatacagcgcatgacgaatccctccggcatagatctaccatccgacgaagtgggcgatttattcgtgtttccctccggtactgtggtagcgtgggggctcccagaaggattcacatcattcctggcaacgcggactctcttgcccgcagcacaaggtgcccatgtggataacctggaaaccgaggatctcgaattcgtggaggacccgaagcgagagaacagtgtgatcaaaggtgacacgattatactaggcaccaaaccaggtcacggagatgcggagggattaccagcggcgcaacaatccattaacacggtgttgaccaagattgcattttcgtcaggtctcgctcggagtacgaagttggccgtcctcgagagccttctttcaaactattttgaatcgactcggccaattccgactcttctatcaaagggatcccgtcttccttttacacgagactttgtcctccggaagacggggcagctgctcagtgtccgagcccagctcaatctctattccgagctcactgattcccttcccgatctcttttgggacagccgacacgagctcggcttggagggatactacgagcaggctggcagagctttagatgttggaattcgcatcaaactgctgaacgagaagatggactatgcgcaagagatcgcaagtgtacttcgggagcgcctaagtgagacacacggtctgcggctcgaatggattattattctgctcattaccgttgaggttggctttgaagtattacgactgtggaaagaaagagcacataaacaggaggaggcgcgcaagcaggaggcctaggtcacccgaggccagaattgacaggcgcgaactcagtgtgattatattgcccgcgataccccttcattttcaatattagacgagtgcaacataagagaaaatgctgctgtcggcaagtaatcaaagccaggtgactcgtgggccgattccccttatcagcccggctgtccccgcgcttagtcatatgagactccgcacgaggacagtacccgtagacgccgacaaccattgtagcctccttaacatacctatccctcgtctaaatacgattttcctagtacacacctacttgtctattcttatattcttcctctgtttcaattcgacacgtttgttccctgaaataacggcaaaatgataccagcgatgatgcggggatcatcacaacagctcatggggattcccggaccccagaagattctcaagaccgtcggctcactctggctttcgcaaactacaaatgagaatgataatctcagaacttcatcatcatgccctctctcggaaattagttgccaggccaatttccacggtcaagacacctgctgtttcaattaccccggtggtcaaatgctgcagacgcaattctgggatgtcgatcctccactcggtcctgaagacgcatggactatccatggactatggtgagtctatatcatatccccaggttgaatgatatcaagctaactcttcaggcccgatcactgcaacggcggctttgaccaattctgcgactccaaacgcaagtacagcaacatttctctgattatagtggacgcgggccggggagacttgcttgaatacatgagcgagtattggaaggatttccggggggatgataacaatctgtggcaacatgagtggaacaagcacggcacttgcgtcagcaccctggaaccagattgctacgaggactatctgcctcaacaggatgtcgtggactacttcgacaagactgttgaggtttataaggagttgccttcctatgaggttagtttaatcctgtcggttaatgaccgactatattcggatcaaaccactaaccatgcgtaagttcctggccaatgctggcatcataccatctcaaacacagacctatgctcttgccgatattgaagctgcactagaacaagcccatggagacccggtcactatccgttgccgaaatggtgccatcaatgagatttggtactatttcaatattgcaggaagtctccaatcaggggaattcatccctgctggaccaggtcggtcaaacttcaaactcgcgttggtaaatcgcaagcttacaaaatagtcagatggccagaagtccaattgcccttccaggggaatcaagtacccactgaagcatgctcggccggagccgacccggacgacgaccataggtaatccagagcccacggcgccaggaactccatttgcaggccgaggtaacttgattgttgagaggcttaaccgaaagcatggctgtatcattagcttcggaacttggttttcttcagggacctgtgcgactttccgggccgaaaagctatcaggttcgtgaccgtgctttccacacatgacgcctctgctattgtttgctaacgtgaagtatccttcaggtgatttatttactctgaattctagcaaggggccctgtgccttcgagcgagacgcccttacttgcggaccacacgtcaacaagcccagtgagttcaccgtatgttcatcccagaaaatgctccaatatatcatctcatcttctcacactgcatacaggccaaggatggtaaactcgcctacagtgatcacactactttctatgcccaaaatcctcccaaggggcgtacacaaagtaatgtgtatgcttcgcaagggggacgacccattgaaattgagattacctgggtctcgaagtagatgggttatctttactgttgtttcactcgctaccctggtgaaacataggtcggcctttcggtgtgatgttgcacagaaatccctgcatagaatggaacgaggggactgttagacgattcctcaacgcagaataattagaaatatcaaatagaaagcgcggtgtttggagtagtatgttaatatatgtcattccttgcgtgaacggatattttgtattccgaaacttgagggtgcaatcggttgattgagggaaggtcgctaagatgcagactatttgtacttttctcttggaatctattatattccagtcttcttttcacctacaattctacgatcaaggctgtgacgggttatgtggagccagatgtaagctgtaggcatagcatgtttgagatggtagagtacaagccatccgcaattatgtctgtcatcgaaggaaaacagtccttgaacaagccatccttgacagggtaggtacagaagagattcattgaaaataaagacatcaaatacatatcgcatcatgaagtgagtgaacatatgaaaagaaggataaacacctggaataaacacgctgccgtgtatcgaacatcttcgaagagatgagataaggccgaaagaacgtgaataaaaacaatcatgacaagacaaaaagaaaaaaaaaaaaaaaacagcaacaagaagagacaaatacatggggggaaataaggggcaaaaagcaaatagcccgaaacactcgcaagtccgcaaagtcgtttcaagtcccgaaatgtgtgcagagaaagaaaacgcccttttttatcgtgggtcattaaagtgtacaaggtcgtcccggatcgtcgcaaagcagtgtcgccgtgaagaagatggtaagccacgccgtatgtgtcgtcgctctttttgtagtaacatagccgctcaagggtccactaggaactcgctggacaagcagtcgattgggtccgtcaggtcatcaataccagagaaggtcttctcgggataatatgacgagacaggggcgaagtcggttgcatcgacgaattgataagtcgggaaaccagggatgcccgagtgagcgagatgaccgaactcctgtcgcaagtcctcggagggatcttgggtcatgaagatatcgatctccgagctgacggatgattcggccagagtgggcgccgaccgaggggaagacatctcccgaggcgagagggcagattcactatagagagattcctgcgagtacgtggattcctgcgagtatgtctgcgagctgaaattcgatgcgtactgagccattgcctgttcgtatctagcgtgggcgagttgaggtggtgacaagggcagcatgtcatcctcgagccgggcattcacggggttgtaggtgtggcatggcggggacattgtgtggtatctgtctccgggagaggtgggcggcgtataggatgagacggcactggatggggcatagttgggcgagttgaacacgggagcatcttgcagagtggcatgggtctgggctgaaccgtttgaggtggatttttcagcaacacgttgacgagtacgagtggacttggcctggcgagtatcgagatccggacggctgttcttcttcttcggggggcgaccgcgcttggtggtctttggaactacaccggtgaagcctccaacacacatatcgcgctggcggtgccgagttagggcatcctgtcgagcaaagctggcgccacaggcacaggcgaagggcttattgccactgtgtgtcttgagatggcgcttgagatcgtgtccgcgcacaaagtgcttttcgcaaatgtcgcatttgaattgacggtctccgaggtgtgtttggacgtgggacttgatgttttccttgcgaccaaagcggcaaaggcagcctgtaaatagacagacccactttccatctttggggtcggggccggagatgaacttggcaatctcgtcagtcgaaacgccggtttcctggactgaggccttgactcgggcgtcaaggtcatcatcgtgagcggctagctcgatgggagacgacacagtagacggggcacgttttttggttctgccagtggaagatgtgattgagatattggaattttgaggcgtcattccatatgaactcggggatggcatatcggcaatttcggcgaacgtgctaatcggggaattgaccggagagggcatttgctgcttaatctgcacagaattgacataggctccttgaaaagactgcgctctctgcatctcagcagtagcggggttatgggggaatgagaaactttgggacttggaaggtgttgggacattgctgtacatggaataatcaatagatcttttcaatggggtagaatcgggggtcaagggggagtctggcatataatcagtttcggtcgggtcaaattcaacataaagattcatacaagcagtagacatttgcgaaagaattttcgcagatggagcctttggttgaacagagactgggtgcattggtccggcataggccgtcacctgctcgttttggatgattggcatgttgcgccgagagtacaattcccaatcggcattgccgacatattgttgctgttgttggttcgagaattgctcttgttgcatacggtgcagcgcacgcttcaatggtgtattttcggagctctcactggctgatcgggacaaggccggagcaccgatggacgagggcgcagggctgccagtggtggtgtggatcgcttgcaattgttcttggttgaaagcctggcagtcagacccgagcgactgttgttgatattgatatggctgctgcatgtgcatgccatgtgggatgaaagcctgctcgggctgctgggcataggattgatactgctgtacatccctcggttgatatgagaaacctgatttttcgttaaaataatctcgcaactgcgagaccgtcttcggcatgtgtcggtcgacattgggctgttgactgaaggagttgtagtccacagtctggcctcgacgatgtgaccgatggggttgcatattggtcatgactggttggtatggagcaactggggtggagatttgacggcggtgacgaccggttcccagcgcgttggagttcatgattatattgccgcttgacggttgggtcctgattgaggtgtcagtatgtgaatatgaacgcaatgggcactaggaagagggaaagtgggaggggtgttagaggctcaagagtatcaagtgtagagtcaacctattcaggtcacacggttcaagtagatattctcaattgaacctggaagagcagaaacacgaatgtatgaaggtttccaaggtttggttctggaaccccgatctatgtgagagacccgcggttctcatcaacaaattggggcgttggcatggcaacggcggtgtccgggcgtctgggaaaccaaaggctttgacgaaagtgggccaacccttgcccgacttcgattttcccgtggtgatcgaggaccttgcttgtgattattcgacttcttctgcaagggcagctagtccctgtgatagaatgcgtataaacgtacctagaatccgtaagattgacacctcctcggttcgtttccaaggagattcgatataaacaaggtgatctcgtactatatagaccttggctccatatatagtacccatagcccgatgggccgatatggtgccatggcgtcatccatggaaatgatattcgacctgtccaacacgggataattattaacgtagcgggcctcaggcagaaataatattcgagtcacgtgctttttctcggtcagcatttcatttcacgctagactactttcggtgcacgacccaccccacgtgatcgcacaacgattttaatcaccaaccggcttccgcgcacaacgatcttctttaatcttgcaaggttgaggaagacaccactgtcgaggtgagtatttggttttaggccagcggatacgaatgtgatgaccatgcgccattagcatgtagtccattctctctctgacttctacattttcgtcgtcgcgagcatcgcactgactttttttttttcgcaggccttcatcaagatgcagatcttcgtcaagaccctcacgggtaagactatcacccttgaggtggagtcatccgacaccattgacaatgtcaagtccaagatccagggtaagcatcgaaatccgcgcgcaacgatcgcacacaccacaacccgaggctctagactaaccccgcaccagacaaggagggtattccccctgaccaacaacgtttgatcttcgctggtaagcagctcgaggacggccgcactctttcggattacaacatccagaaggagtcgacccttcacctcgtgctccgcctgcgtggtggtggtaagaagcgcaagaagaaggtctacaccacccccaagaagatcaagcacaagcacaagaagaccaagctcgccatcctcaagtactacaaggttgacggtgatggaaagattgagcgtcttcgccgcgagtgccccgctcccgaggtatgtgatagctctgtcgcaaaacgattacccttatattctgattcggaaactaatttgtcctttcttatagtgtggtgccggtgtcttcatggccgctatgcacaaccgccagtactgtggtaagtgccacctcacctacgtcttcgacgaggccaaataaacggtctaagtcggaccgtggtgtgctgtcaccgagcttgggcgtggtttctgctaggctagggcaagtgacggagtgtcgcggttgacgctggttgatgatggttcttggaataccaatgtgctacagtcaattacaaacaaaaactaggcatccgccgaaaacttaaaaattccacgtaatgataagacttgtatgtattcgtagacttgggatattgtcatatcctgtccgatcaaccactatactgcgaacaacaatgcttaaatccgtgtaagccctcactcaacctactcttccgggaacccagcttggacattggcatacttgctctcggggaaatcaagagcattacacgactgatccaaagcgcctggaccacccacaccgtcaacaaagataccgatcaaacttccttgcgccggatcagcctccttcccacccttatcaccgctactctcccaccacataccaccacccagtccgcgctcgcgaatatagttcgccttgatctgcgccatatagggtgtgtcgtaagtaaccatcttgcgcgcaccggcatcatagcagaacgaggcaccaggttcctgatcaaactgctcctgagccccgggtctgggcagtgccttgtaatcccacaccccgttctcccagctgccctctccgacgccggagaagggggcgccgggtccgtcagtgttctcaaatgcacgtccgtacagcggcatgcccatgacgatgtttgagggtggtacgccgccgacgttgatgtagtagtctagggcagtgttgatggagaacggcgtggatgcagggttggaaactgaaggaacgatgttcgcttggtggccagcgttgctgtcccagcttccggcgaagtcgtatgccatgaggttgtagaagtctagcactggggtcatgtcttggaatctgagcttctcgtaattgctcgggcctgtagtagttagtttgatggttcagggcgcttttctatcgccgaggatatggtatagacataccggcagggcaggcgattgacaagtagaaacggcgatcgggaccggcctctctatcaagaacctatttccggtcagttgggccaatttctaagaaccagaataacgatatacctctcggcacttccgaagcagaagaactaggtgctcagcctcggtatcatctagatataaaataagcctcgtgcctccttcgagtatgttccgacaaacccacctttaggatattcccaatcaatatcaagacctaagaaacagtcaaaaccagcatttcacaccatactagtcgatgaaacataccatcgaatcccagatccagaaccaagcgtgtcgccgattcggcaaatgcagtccgaccctcatgggaactcgcaggctgcgcgaaattcgaggagtacgtccagcccccgatagaaagcaaaaccttcagcttgcggttctgcttcttgagcaggaaaagctgcttaacacatccgtacacattagtaccgacgtcattccacgagtctgtcgggtaatgcttctcgacgtcggaccaagagtcggtcaagtacctgcaattctgggtcagaaaatcttctgcagtctgtacggatcaaaatcaggacttacacttcgccactttcgggacggatgttggcaaatgcgtagaggatgtgtgtcagcttctccgcgggtagatcctgcgggttgtagttgcggccgtaaattgcctatgcagtatgtcaacattggagttcttttctgggttgtatatgcagccagttaggcatagtaaaatagatgcagaccatgcagtcggagttgaaatggtgaggccaagttaagtatagtacatacccagttgacaaaataggcgactgatctcatttcacacatggctgatgcgggatgggtagtacggggattaaagtattgcacgagaacagccacaagtagggcagtaaacagagcaatagacttgagatggtacgccacactttcaagtcaaaagaaagttaagagagtttcgggagcactaaaagcaagtatttcaagatacttcagttatgtcgcagcctaattgttagtggacttgtcgtatccttaaatctgggcagtgtcaacgccacaccctcattggtcaggactcactgggcacctgtggcggtgtatatattcaggcaccaaggcgacaaacgtggctgggtatagaagagataagaagatcgaagatcagtgagtatctgtatatctgtataagctggggaggacctatgtcggaggttatatacatatgtataggtactaaatgctcagaagggtccaagaaacgtggtgtgtgacacctccgcctgttcatcgtgcaatgtaaccatacttggccaatcctaatatgtctcatgtaatagtgtgttagcttattagatttggacctgcaactcattgtttagaagcacgaggtaggaagtatgaagtactcgtgatgttaagaatgcaactctccactctccagaatgcgacatggccatcagaaaagaagcaatactatgtagaatcaccattgactagtcatgaggactcgtttactagattcgtggttaagaagatcctgaatattctgaagttcgaagatctcctgattggaagtatctgtataaaaccctggtcaggcgacttacctcgaatatgcccacagcatcggattctttcggcagcagatcaactaacccttagtgagaggcttcccaagccgaggaatgtcggacaagcggcaatcccggatagtgatctcgacaggagatgtacaatgatcgactgaaactacacgtggagtcagccttgaacccacctgtctacatgtgatgaatgtatgtacaatacatatgttgcaagttaaaactgcatgaaacgcaagttctatatccacaaatataatattagatataactagcactcggaggcaccgaagttgatgtgcaacgatcgacaaagcatcttcatccaaccccaccgggcctgggagccataattgaatgccgatcaagacaaacaagagccgaagatacgaggctgtcccgggaagcgggggggggggacatctagaaagagaaatgtgattggcccgcccatnnnnnnnnnnnnnnnnnnnnnnnnnnnnnnnnnnnnnnnnnnnnnnnnnnnnnnnnnnnnnnnnnnnnnnnnnnnnnnnnnnnnnnnnnnnnnnnnnnnnnnnnnnnnnnnnnnnnnnnnnnagtaaggaagtggggggggggggggggggggggggacatctagaaagagaaatgtgattggcccgaccatagaaagttaacccaaaggaaaccccgggaataacaaagaaaagaagaaaagaagaaaacagaaaaaaaaaacaacggctgcaaatccaatccatccatagctgaactcgagccgcgatatggccgtttgtagagctgattggatcgacacaagccgaactaacgcccttagcctcgcaagccgtgtcggaaatctctacatcgtatgccaagttgatcccgatccactttgatcgtaacgcttttcttttaccctagatatacggtggatcgatttcagctggtatctctgcctcggagccccaggtgtctcgttcaaaataagcctctacgatgtgtcctttgtccttgcattagtacggagtatgtacctgaaagcaaattcgtctttgcatcagaccatgtggggcattggggcattggggcattagggctatcttctgttatgcacttcattcaagtatgtataacatccggagcagagtacttgtccatagtactacgtagtattacgatgtatgttgtccaatatacacataattagatctggtcttgtagattgaacaataaaatggaatggaatgaaattggattggattgagtcttcaaacagatctcatatcgcaaacagaaatacagcccaaaaaaaaaacaagaaggatatcgtagctataaccaaaaccacgcaagtaatccaaactcattttgttatttcacagaaaggcagtacacacggccagcgctatacccaccatcccacacaaacccctctattaaaagaatcatataacgcccaacaaggctcacaagcactcaaaaaaaaagtacaaggcaaaaaatccgaaaaaaaaaaaagaaatcccgcaacctcaacccccacgcaacatgcatttgttcctatttccaattttcatttccgtttcattactttacctacccgcaacccaacgatggatcacctccaaggacgggtcatcgtcaagccagtgaccagcgcgcagatccgcagctcgcaagtccgccacgacatgctggtctgtgaagcgcgccagatcctgatggagggcggcagttgcgctcttcaatgctgcagagtgctgggctgttggaggggagccgcgtagaacaccggcgcgcgtcatggcccatcgccgggctgcggcggcgcgcaggtagatcttatgtgcttggaatcggcgtgcgctgctgtccagtatgactctgaaggatgatgttagcgtcttcacataattggatgttcaggttttgctgtatacctttgtagctcggctttctcggtctccgcgttcccttgccctgtcaccgggcagggttggtagttggcggacattagggtctgggctgaggctagggactcgcggagtactacgaagccatcttcccagtattcctcttgggatacttcgacctgctgttgcgagatgtggagcaggagagtgcggtagtcgttgattatctcggcgactcgcatagcgcgggcttgattgactgtgcgggtattagcaggttgtggttgtttgattggttggttagggtaagcttacatccatctgccatgttttcggtagattaagtatataaaaggaaggcaatggatcgacgagtagcaatgatgcaaaaagctagtataaagaacgggctgcaaagataaccaatgagagatgaaagaaaggcaatggtcagaggaattgatggcccacgaagtcgagaatgttaggccaccaacggtttccgggggggaaaagaaggagagatataagtcttcaaagattggaaacagtgtctctcgttaccccatacatgatcaatgggtggaccaaaaagggaaaaaagccatgctataaaataataataacataaaaccaagggatttctcagcctacagcggagccgacgtcaggatacatcacgaagagaacgagctgcaccaatagacgcgcaagatcccacgatcaggtagttcgggttgtcaagcacagctgggatgggacggggccacaccataagctcccgaaaaaccgtttacggcatgacaagggccatcctgatcccaaggagagggatcggtggagaaagagagaccagaagagaccaaaagaggcatcgcatattaaaaaaaaattggcctatggaattcccagtatcccagctgtggattgggagtggatagcgttggcccgcatatgagattaggttcttgcgccgatttggcgtttctggtgcgaatagagagatggtgtttcatgctgctgattggagaatattgaatgaactactgactcagtggggagtcatgtttttttttttgttttttttgtccttttttcgtgtcgatgcatcattcccaattcctcgtgggaccctctgtcgaaattccgaaatagaaagagttcaaggtaaaagggacaagacctcagccttggacctgcattagacatttcctcggacctgaactcggacttgacgtgtagtggatctgacaagtggtgaacatgttcagctggtatattggcggagtatttgccacacgtgtagtccaatcagatgacgagaacagcctccttggataatttatcagtaagccacattgtggcgcccacaactcctagtagctgtctactgtctccttgctgttaggtaggtaacactgtgataacctggtagcgaagcaagcccaaagtttgcactggtggattctctaccttggacaagctggacaagctggatatgatctcgggccatccgaaaggggtatcgccgagagatgagattcagtatagcatcaaggtatcgtgcaggaaaataattgagttatcattcacagatcgtctgtttctctaaaataaacaccggagtccttccattactggtctcttgcctccatagcttggacccagctcactcagtccttctcggctatggcttgcagccgttcatcaatctcctcttccgtcagagcacggaacgctgtagtggtcccctcctcgccgtcggcccgcggcccaccgacgacaccaatctcgatctcgtgcttcttgaagtcgacacttagcacattgctgagggctgtaatgcccagctccacaacctcctcccagctacccggggctgcatctttgttcttcagcttcttctctaggtagttcaacgcctcctgctgcttgggaccggatgctgttgccttgtacccaacatagtaaccggccgggtcacatttgtagagctgcgggccgctctcgtcatccacagagatcaaggtcgtagccacgccaagtggccgcatgtaagcctgcgaatttcaaagagaaccatatcagctattctgtctcactgggtcgtacggtggcgggaaatcctaccctttgtgtgtagacctggctgatatttgccagtcgctttgccaggacatcgcatggcatctcatatccgaacttgtaccggaactcagcagcctcaccacgggcccggtcaacggatgcgcgagcatctgctatggaaccggtcatcacacagcctacggaaggcgaaatgcggaaaacatgtgaaacggaggacgggtcgatcaatttatcctggtaaacagcgagtgtaagcgcaatcccagcgataaaccaggaattcatcttacagcgactttcttctgcgagagtaccacggcacaatccttgcccctcacaccgatggaggtgatgttggctgaagtgatagccttgaatgcatattctgagatatttggtcagcggtcatgatgacagcgaacgaattgaggatgctgggcagatcgaggcggaatcatcgaccagtggataatacataccaacttggtacagtcgaccctggtcagagaagatagtgatatgtctgtcgtaggcgcttcctgcggagagaacgaatgtcagtcggggatgaagtcatgaggttgggctgggccatcatcgacgatggagcataccagacatgacggcgaatcttcaagtatttcaaagctggattaatagaaggaaaggaaagaaatgagcaaggacggtccaagaggatgagacgatgggggttgatcagtgacgcgtgccagagctgcctgagctcaagcttgaggtcagcttcaccgccttccaggtttctctatcaacagttcaacagcacatggtcatttaccacgaatgagctcgaggtatttcacaggtagtaagggccactgcgtgaatgattaaaagcataactcagacttgttattgttattttctttgacctttagatgtgtgaaatatcaacttggaagagaaaatgaaccaactacacacacatacttcaaacatcaatatagatgacatgaggataaaataacttttgacatgaacataattacaccgtcccaaatgctatggtagagatatatacacatccaaaccctaggtagcaatgcaaaccccaattcaatagaactagtcgctgtcgctttcgctactcgagatctcgatctgagcagtcctgagctttcgcttctgtgtcttcttcggcacagcaggctgtacctttgcttcacgaactggtacaaacttctccttcctcttggcagctttgctttccttcttcgacattgtaacaccactcgcggcacttttcttggccgaagccggggcagcagacgacttgtcatcactgtcgctgctgctgccactcgatgaggtctcgtcatcgttatccggcgcgggcttgctagcaggcttcttcgaagccggggcatcatcatcgctatcctcactgctgctgctgatatcaacgaccatggttctgttcttccgcttcttggttaccgggggttcggcagccttgggtttcggtttcgatttcggcttcttcaaatcctccgcgctgaaaagcttgccggcaacagcgaaaaagaccagctctgctcgctgcctcttcggtaaacgctttagaacgtctccctccaacttttccccgaagttgaagttgtccaaatcctcatctccctttggcaagcactcgcggaacgcattgatagcttccaggtactcggggcttgttgaaggctcctggttccccacttcttcatcctccttcggcttgtcaagatccatatcggccttgatcacgtcccgcgcagcatcgctcagtcgctgcttggcggcatcacctttcaggccctgcatgtacgccagcagcgacgtgttgtacttagatgggacatgctcaagcgaatacaggtgcttgaacagattcgtttcccggttcttctggaacttccatgtcgcgcgtgctcggtggtagtggctcagatacgagagaataggcgtctcgtggattggggcttgagtcgacgcggtgccgtcttttctttgcttctttttctcccgcttgcgctgcttcatctgttcggcagtcttgtctccaacgtcttcggtgtctgcttcggctccgtctgcgtccacttcgttggtagcggcggcgtcattgctgtcggcttcgtccgactcacttgcggagtcgccatcgaattcctttgttccgggtccgaacgagactcgctttttccttttcttgtgcgattcatcctccttgccattctggtcgctgtcatcttcggtatggcggcgcttcttctttttcttcatttcgccgtctgtctcgggtgccgtttcctcggaaatggatttgcgttttttcttatccttcttgtcggacttggcatcttttttgctggaagtggactcctgtgcgtctgcacttccctcttctgtagaatccttcgacttcttgagcttcgatccgagctttttcgacgctggggactgggcgtccgtctggtgcgccatcgttgttgtggtgggttgtgatagggtcgagcaaaattcaaatagaattgagagtagcgtgacgctctaaagaaggctggaatctgaaatccagggcctgttaatgcgacctcgactgtggtgctaagacggttggcggagactactttttttctgccgatcaattgcgcgggccaatcatgttgtcttttcgttctacatactcccgaggtctctaatggctattaagggaatcaattgaaacatgtcgaaaatatggatatgggtggattgtatagagccattagttagaaaattgtgcttaggtatcttgctgatctagatgttgtatactatcaactagattatacaagctctgtgatcaactacaacatatacaaccacatacttattggtggacccgtcatctgtggataatagtttcagaaagtgattcaggtaaacttaaggtgtcgtagcctctagtcacccgtaggttggagtcattactcttttagcatctcatattatattcgttgatatttattcagctcttgatagacttgtatacacttggatgaaaaggaaaatatcgtagaactcgtcaattgcgttaatgataccctaagaaaaatgtgacagctgcaggcatctatgtcccagttccagaagcgaagccaggatcattagccccagtatcccttctctccctgcgcacctccttctgcacaaagccctcactcccggagcctgtagccgccgcagacgccgcagccctccgtttcgccttttcccgttccttctctttttccttatccctagcgttcggaccagccgcctttcgccgtttaggcagttcatagacgtcgttgaagttcatcaccacgcctaggaagcgcatgtccacatccggctggtacgacagatcgccgaggaggacagtcagacgggagcggaactcggcggagagttcgcggaggcggacgcgaagcgaagcaagcatattgtcgtcggcggcgagattggggccagataatgaaagcggggtgttgacgccgtccacgccggcactatcgggtcggacgtccggggtcgaggccattgaggccccggtgcgggtgctggggcgggagaggagatcacgctctgtgagaccccattgaccctgggcggagcgagtttcgatcttggcgtttatctcctggcggcgggtgaattccgcaacggagaaggagtataggccatccacggcatctttgtaggcaagcatgaacttgagaatctggtggagttggctgaggaagctttcttcgggttgtttggcggaagtcgaggtcgaggtgccgtagcgcgaggaggatgcagatcctagtagacccttgtgggtgatggagttgaggtatttggtgtgtgcttcgataaggtcgtccagcgtgcagtccggtctccggattgcctcgagcagttgttcccaactggactcgatgacttcgaacaagatatagtattggagctggttgacgaagtggatcatttctgcaatcacgcagcgtgctcgcttccagtctgctccgactttatcctccacattgccgagcactccgcgtgcaccggtcatgcatcgtcgccaggtgctgttcagcgcgaactcaactcgcttgatgcgccagaggaagttgaacactttcaagtattgagttgacgcccaaggtgtgatgaccacgtccacgggagcatcgattttgtattccaatgtgaagcaatcccatccaatttcaccgtggctcagctcgagcatacgggcatcaaggcgacgcagcacttcgggggtatcatattgggcattggaagcacggatagcatgttccagctgtgcagttagggtatgtcgatattgtgaatttgctggacgatccagatttgtggcaagcgactccatgagtaaagcaatgaagtctccttggcccagtagcaggtaactcttcagtgcttttaggtgatcgaggaggttgaatttcccattcatcagggtaatcaatcgagccattgtggttttatacgcctcatcaatggagatctcgagagtggcggtgtcaccatatcgaagctccttggaggcttccttcgaataggcctccacccaagccgaatcgccgcagccatgacggatgaagttcaaggattttccaatcaagaaaatcttctttgcaaactcttgcgtaatgattgaaggtaccatgtcatcatcaagcctatatttgtcctcccaaacactggttgcaagccgccgggggtcagtcttcggccggaactctggatcagcgacaaagaattccttgtatggatctgacagttcgccatcgtaaatccatagtcgtagcatgtcgtagaatgggcgtgtcacatgtgcaagaagtttctcggcgaatgcacacacgaaggggtctccgtgggatgttgaaaagctgtgtattaaggaaatcaactggccgcccctcttacctatgatatgcgtcagcaattgggaggatattcatccgcctgtctacttactttgagcctcttccacgatcaaactcattagtcgaagggccatggtagcatctctcgtccacacaacgcatcgcttcaaggtaacgccaccctttcgtacaccttgaggctcggttccttctccaatagcggccagcgcctgtctgatttccgcctctaatgtagccactaagctaagatatgcgcgcagctcaacggcaatggcagctcgcaagctctggttcaccagtccgccttcttcgctctccacaaacacagacagccctttatagagcagacaaggctccgccaacgtgttaaggagtgaggttatcggcgcagacagattcgagggcaatttcaagctcgacgcggaactaaattgcagattcgacgaagacaacccttgcaagttgaacggaaggtcacgcagtagcctctgctcaaccgacccagaccatttcgccggtgccgatggattagcagtcgagggccgagacgaggcagcacgaacatgttcatcgctggaatggtccttcactccagtatcaatgcgagtagctggtatgtcagccgagttgcgcctagcctggtccacgccatcacggtcaatatcacgtcgcagcgaactctgtcgctgtatcttcgccggcaatacgggttggtgttgctgcgaagccgacgagctaacagcgggaccctcctcatcggagttgaccatcgtgccccgtcttgggcgtgcaccatccttcctcaacatattgtgcaagtgcgcatcttccatcaacgggctccggcttcgttccccgccctctaactcatccgaagcagataacttataaagcagaaagaggataccccatttctgcgacagcacaggctgcgtcaggaggcgcgagtagagatttgaaaaccgcaccgccttatccgggctgacattttcgcggcgcagcttgcgcttaatcagatcaggcgcgttgttgatgctctccgttcccgcgaaacttccgcggcgtccaccaagcccagctggtgatcctggatctggagcgttggtgctggcgtgggtgtcgagaatgcgccaggcgcgctccatgaggacatggtggcggcggctttcggctgaggcgagcgcttcctctgtgtcggagtagtcttcgtcttggatggcggagatcgggagcgctggggtcaggccatcgactagctgggagagggcgtcgtctaagcggcgcgcgcgggcagggttgcgggctgggtttgacattctctgcccggtgccctagtgggcgaattggtcggggtcttgtatctggaagtgcttggcgtctgtgggtgctttgtttgagatattgtcggacaagagattacggtcaggcagcgggtttggggtgaaaatgtcgcgaatcaattctgacactagattgtataattttaatgtatgcctgaggtgaatatttcaattcggatctcaatagaagcaacgcggactcaagcttgaagcttgagtgtttgtgtttgagatgtttggcgcgtgtgggtgccaatttcctaaggcaccacgatcttatcgtcctatcgctagttatcagagtctttacccgatatgaatatccctgtcatataaaacttcaaggttgctcttacgacacatctcggctcacaactccatgtcattccattgtgacatagctcttcgggctaaattgcaagaattttcaatgaatcccctcacaacaattgaatatctgcttgagcctacctacacacttcaagaagaccggagcgtggccttcaccgggcaatcatggaatatgcgcaagggacttggatttttcggtctgaattccagcgattattgggctcaggctaagctaatgcacagtcagagcgcaaccaaggtgcatgcatcataggggctatgattcggggcaaatcctcgtagacccgctatagtgacgtccataagtcgttcatacaagatctgtaggatttggagccctagaggccctaactaaaaaatcattgattgattttattcctgttttatctctgttctttatatgttcttccatttctcttcccatgtccatactttaataaaccaaatgtacaatctcctagtatggacacaggaacatctacctctgccaacgctcggccatgtttccgacttctaggtaatgcaaagctcaaattactcgctgtattcttgacgacctcgacaatcctcctactcacactatattcggggggcttgtccgaaaacatctcacctagcgcgaaagacgagctagcgaatgagaaagactactggacatgggaaacgagcactcgattccagaaatccaagcatgaaaacgacagcaatgacactgggaagtcccaaaatgcgacctgtgacacattcccgacagacgtgctatcgcgcgtccagatcatcttaaagaccagcgcaaccgaagacccaaaacgagtcgatacacacatggcctctgtaacccgctgcatttccaacttactagttgtgtccgacaaagagaccgagctccatggccatcgcgtacacgatgtcctagccgatctaccaccttcagctcgggatctgattccggagttcgaagggtatgatgcgctccaacgcggggagagtaatgtcgacggcgcgacgggctggaaactcgatcgattcaagtttcttcctatggtggagcgggctagaaaagtcaaccccggcgcggagtggtacgtctttctcgagacggatacttacttcgtatgggataacctgttccgaatgctgggacagttcgacccatccttccctctgtatatgggctcaccggcgccgggccgcgatatcggtaatggaaaagtcaactggtttgcatacggcggctcgggcttcgtgctgtccagagctgcggttgatatattgacagcgcgggaggttggtaaatacgggcagtttattgggcaatcgctcagcgaacagtatatgcagacggtgaaagatgactgctgcggcgactctgtgcttggatttgcgctgtgggaaaagggtgttgagttgtctgggatgtggccgatgttcaacgcgcatccgctggactcaattccttttggcgacgagcatcactggtgccagcctgcgatcagcatgcataaatctcgattgagtgatatgaccgggttggcgaactgggaaggtgagcgggatagaacggtatgattcggtttgctgaacctagtggtacacacatgcacatgctaatccatttcaattcagaagcccttactatacgcagacttggttgattaccatcgcctcggacagttgccagaacggaaaggatgggataatggagcctggggtgggattatcgaacatcctgatactctgccccagcatgggtcattagaagcctgtcgacaggcatgctatgacagggattggtgtatgtcttacacttatgataccgccggggcctgtgtgtttgtgcagagcttgcgacttggagctgctagcaagctggaacttgcggaccaattcacggctggatgggacaacgacaaaatacaaaattggcgggcaagcaataagtgtgaaaagcccatgtggatgaagccgagtttgacgagaattttctgaagcgctttaggtacacgacttcgaagtgatttgatatacgttaataatggatatacgatgtctgaggatacatataattcctacagatcccagggcttaagagttgcaatcatgaaatacaacgaccctctacatccagcgatgtaccggatgaagatctatgaatctataacgtgacactttcaaagcgattgtcgattcatttgcccaaccgtctggttcaaagaaactagtcaaaacacatcaaaaaatcacaaagccatccgtacgccgcccaggaatcatgtatttcgacacaagcaacccacaaatgggaaaacaaacaatgcaccgaagtgccctcaagtattagacaagcgaaaggtaaagaatcctcggggccatcaaggacaaggattaaagaaaagagaaagagaaagcgaagaagggtaaaaaatacaacaagggaaaggggaacgtcataaaagcagaaagaacatcaacctcaaggtagccataagtagaaagaagaaagcatctcatacgccggattgacacaccctcaaaaaaaggtcattccagaccaccaagttagtccgtccatttttgagtcgtgaggatcattaacacctgcccatgccaaaacagtcggcgtagccttagccgaaagaaaccgcgagtaaaacaaactcctaggaagaagagatcaaccgccggtatagcggtgaactgaatttcctacatgcggcgaaaagcaagataggtatcttgagatgagaaacaaagcctgttttctcaccgacgcatgccctgagtagggatgccgccctgcatacccatgttgggcggcatgttatacccgtggtgatcgtatccggctgacatgccgttcatcataaggggaccgagcccttgagcctgggagaccgggcagtctttgtgtgccagcaaaagagtcttgaggttgacaatctcttcacgtagttgagtcaccgtcgcagtaagggcatcattttctgaggtgaaaagctccaccttgttttgaaggttagccagccactgcttcttccgttgacgacatttcaaagccgcgacactgtgtacaaattagcatttcaagttcctgaatgtaaggtggtcattcataccgattccgctctaggaaattgcgtcgtttctcctcatcggtcatcttcttggtatccattgggaattgcttcatatcatcgtcgtcttcgtcctcgtcatccatatccgaaggcatatccatgttgggtttagcccttttgttggaacccttcggggcctcttcggccttgcggcggttattggtggagcccttggtgttctttttgcccttacccttggcgggtttggcggattcacgatcagatgcatccccaacactggtaccgttggtgttctgggagacacgtcgggcagctgcggatcgagcatcatttgacatttgggcatggttcattggcgcattgttggcctggccacccttggccagcatgaacagtccgttcgccgcatctgccgcgtcatgctgagtgaagtcagccggccgagctggctttacttccatattgacagccgcctggtcctgctcattggggttggaggtgggagcatttgaattgttcttcttcgctgtaagtgcggtgcggtggaaatcaatggtggaaggagtggcgccaccgttctgaagttgttgcaagagcgcctgtgagttgggactgggggccgggaacatagagcctccaccccccggtgtcagtcccgtgcggagggaggactcgttcggggtagggaagccgcgaccgatgctgtcaaagtagtcattggggccagtgggcccggggagcatagccggactgagaggacccgcgcgtagggagttgttccaattgtaaccacttgacgaactggtgccaggtaaggccggtgaagtcagggcagccaccgagggaagaagcgatttgcctggggtgtcggccggattccctccaaaggattgctcaaatggattgggctcgagggagaaaggattgtgcatggaattgaagtagtccggagtatcagacgcagtaggcgcacccggtcgtggaggtggcgccaacgaggtctgagtctctaggttagatttctggtcctttgacgcggcctgcgagtctggcggagaggttcgagttagcaacgcgccaagaattaatgcgatcgcaaataggtaccactgcggttttgggatcgagccggtggcttcattgtgtgtggaatatgcatgtgttggtggggaggaaatcaatgacgccagtgggtgaagtcatcgcgacggcaaaggacttggggggaatttaagggtcggggaacagtggcgtattaccaaaccaaaaaggggacttttcttttttggaagtttaatgcagaacaacataaaacgagggcagcagctccataaaatcgcatatcacagtatggtaaagcaaaagtacgaaggaaatgcgcaaaaaaaagtgtcgtgacacgaaccttctttttctgccttcttcgagtccataggggatgaagacatgtttgatcgcagagtcgatatggctggggcgaccagagcagacatttagctgggatataatggatataaaatcggtgaagccaaacaaacaatggcttctagatagtcggagagagagtgagaggaagagagtgacgtagggggaagagggatatgatgaaatttagggaatttgggggttttgctgatgaaaaaaacagaattacggtcatgtattgtattggaatcagaaacgggacggattctgtgtgtattcagcataaatgacggtaactggctttctccgaatcaggttggctgttcgtctccaccagagacacattattgtgttccttttctgctgttccacatccacgttgttctactatctcagacattctacgttctgtaccatgaggaacccctacacccttacctcggatcttcaccatacggcagaggaccaattggatataccaatcctcatttgccagtctagctgcgagaatatcaagtcgacgcttgcatctttgatacggagtttccaaggttggtctctgggtattatatccattatgtcacggtgacgacagaaatctctcccgctgtgggccatccaccctctgacagccaatcacaaaccattattccccagtgccaaggccagggatatcagctaacccgtagaatgcggtgaaaacgatgacgcaatcgatagcacgtgagggctctaccatggaattctagctagatatcttgatcttcagatatgtagaacgttgatagacagactatacacatgttggcagggtagtagatgccaaataggagacagcgagggctctactacatcgtacctgaccgagatctgtatgtgtaagcttgtacaaccccatgtaaaattattaatcagcgacccacctggtatccatggatggataccccgtacgcgtcgtattcatacggagttctccgtattatacaagttcgagatcgcgtccactcggttgtacagtacccaaatacataacattgctattgactctcttctgacgggccctggtctgatgcaataggctaatcccatgtagaaaggggattttcttactgtactgtacccggtagctggtacgaagtaataatcttatattaaccaactagttaggagtgtcgcgagaacgtgtggtccattgcatacatcgtgtcaatcttaaattgaacgccaatcctttcgatcgttacaaatagtgatctagcctaaattagcctttactcactatgccattgggtcggtttgaggataggctgttcccacaacgggagagacacttccccacagtcttggtatgcttcaaccttgattgtacgtatatgcatcacctgtctattgtgaagtagggtgctctaagtggaattagcttaattgaaatacatattgaagctaatatgtcttttgaaataacgacctcatatcaaatagtataagatgttacggatgaaacattacttccagcagtatagcagaaaccaacacagtcgagatactaggcgatccatttaacaagcttcaagagtaggctgcccactcgagctcttagcggcatatagctgcaatatcaactaccttcaatgcatgacttactccgcggtataactgctgaagataggaaagcccgaagtatgacaagatcttcagtgtaggagtggttcgtgtgcggtttctttttccgagagcaagtggacgttcgatattacatctccagtaaagccgttatcctcgccttcctaaataggcaggcaccccaaagtctacacatacctagaagcgcaaccgattaatggaaccacagccaagatttacgcttggaaataacacattcaatagagatagtccattgacataggaattatatctatcaagccctggaaagattggaatatttacaattcccccatcgttaaagaaccctcaattataccacaacttcacgaaccccggtaggtcgagtagttccaaggacccagcaggacaggaacatgataatggcgccagccctcctcgccctcgcgaccccgtcccttgacagtgaacttaacctcaacctcaggccagaagctctcgacgccctgggcctcataccagggacccacgtcgaagcgcacagaccagttggtcttgctgtctgcagcaggcagcgcagccaagatagcaggtacggactccgaggctgttccgacgggcgtccagttggcaacgcggccgtcggcgttggtggttgcgcggaatgagatgctgctggcggtggatgcaggcgtggagaggagagtcagggtcacgggcaggttggctgcgggtgtccctgataacgtgttgaggcaatggcaggtgatgggatcgcgcgctgccatggtggtggtgggttgcttgattgggtttgcgtctttggtgtgcggggccggggagatttgttgctgataaagtgcgaggcggttggtggtgcgaccaagttgttggttattttgaggggagtccattcattcaaatggtagagggaatataggagaagaagagaagaggggagaaagaaatacagaaggaggagagctcgacattgctatcaaaggttcatcggaggataccgatggccgcggagagtgccatgcagctattaattgggggtctatgacttgcgcatgtatgctgtatagcttcttcgcttctcctctttatgactatctataggaaatagaatgatctctattttgacagcttaaatgcgactttggattcgaggacaaagagcttcaagtgccatagaaacctttcgaattactagtagaataatcatgatcatcaggagcctgcctaaccatatatattgaatccaagtcaattgtacgatagaattagaaaaacatccaaaacgacaaagttgaagcgcatgatgtgaaagtcttgtcttccggaaagttcgatttgcggggctacttcgccttcaacttcccaacttcgcaacattcagaacttcaacaaatcatacacaatgtccgccgtggtacatagcgatgacctcgacatggagcctacgctccagtcgattctcaaccaacacactctccgttggatcttcgtcggaggaaaaggaggtgtgggtaagaccaccacctcgtgctcgctggcgatccagttggccaaagttcgcaaatccgtcctgctcatttcgaccgatcccgcacacaacctgagcgacgctttcggccagaagtttggaaaggaggcccgcctgatcgatggctactcaaacctgagcgcgatggagatcgaccccaatgggagcatccaggatctgctcgccaccggagatggtcagggcgaggatcccatggcaggattgggcatgggaaacatgatgcaggatttagcattcagcgtaagtgctatgtcgctgtcgcgtaatactctacgtgtcaatctaactcttggtgttaccagattcccggtgttgacgaagctatgtccttcgccgaagtcctgaagcaggtcaagtcgctttcctacgaagtcatcgtgttcgataccgcgccgaccggccacacccttcgattcctacaattccccaccgtgctcgagaaggcgctcgccaagctctcccagctctccacccagttcggtccgatgctcaactcgattctgggtgctcgtggcggtctacccgggggtcagaatatggatgagttgctgcagaagatggagtcgttgcgcgagactatcagcgaggtcaatacgcaattcaagaacccagacatgaccacctttgtgtgtgtatgcattgcagagttcttgtcgctctacgagacggaacgtatgatccaagaattgaccagctacaacatcgacacccacgcaatcgttgtcaaccagctcctattccccaaagaaggaagcagttgcgaacagtgtactgcccggagaaagatgcagaagaagtacctcgatcagattgaggagctctatgaggatttcaatgtggtgcgcatgccaatgcttgtcgaggaagtgcgtgggaaggagaagttggagaagttcagtgagatgttggtgactccatacgtgcctccgcagtaaaggcgatgtcgaggcgagatattttgttttcgctcatgtcggacgaattatgaaaagactagagaatattacgtgaagcgttggccttctgtggactaagattggaacccatgtagagcatcaggacatgaattcatgcatattctgtcgcatcttgactgacctgtgatgaaagtttgaccacatctcggtcgatcggagatacaacacaatccttgtcaaatgacattggacctaatatatatctgcgagaggggaactccaatcgttccctaaactcgtctccatctaccacgtgtttcgaccaccccccatatacaatatgatcttggcaatttagaatgcatgccctcgaagcaagtgtatgcccaaaagcgagagatgcagatgtcctcgctgcagctcagtggtccccgcgatctcacggccacaatccgtggtgccacgacaccaccgcatcaagaaccaatttggccctgcatagatttgataaaatctgcggtgagagaaaagcagacgtcagaagtcacttccactttcaaatattcctacaggtactcgtttttagggaaatactcccggagtagtccaattctatgcgccctgggattgattcgagcccgatgctcctccatgcaagcctcacttttgtccaagacagggcccttgttactctatagtaaggagtggaaaaagtgggcagaccaggatcccgtttcatcctgacggtcagaagctctaaattgacacacatcaaggtaggggaaaaaagggttgggcctcgttggccgataaagtgaggcggttctcttgtcctccgcccccgaacgttccgacatgaaccctcccctcgaggggaggacgcagaatctgagccgtctctggtgatttcctggtttcccattcttctttccgccttccgtggagactcgctccagagttaccggattcgtgggtatgtggttggtttaatttgcctatgtgcagccgacctggtggatcgtgctgttggaagaagggggggatacgcggtcccctctgccgttgacttgttgtgaaaccatattccgaaggatcaaggttggagattagtgcatttccgatagagatctgtcttattcgtctccgtctctggtgggatttctattcgatcaaccagagtatcaaccaacatatttatactccaagtctcgtccttcggagctgtgccaaaagtcccaaaaagagcttccaagcacggaccgtgtcgaactagcaaccctagcccttacttcgcctcgccttgacgcctcacctcttagccctggcaatgtctcccgtccagcaatactggcttccgggatatgggttgtcccgacatattgtcctaggccatatccagtactttcttggaccaaccgcaacagtcagaccctacagttaccaggtatgtcttgccattgcttccactacaccttctctatagcctgttctaaccagttaccattgcaggggcgcgagggttatctcatcaatggcgtgccactcacgcgggtttgtttcccccatctttatttaagcatgaattaagattggaaagagagaaagagaaaccaaacattacacaccactaacgcatccaaacaggaacaaattgatgatcttgcggtaatgtcccgcgagtatgagaagcaagaagctactcgcatggcccacaataccagcggcgcctcgacttctagccccagcagcgacaacccggcagctcagtctgagccatacatcaatgaaatcatccctattaaccaaccgggaacacgcaggcctgcagactcgcgaggcggtcgttgagaccgacgttattccattgcttccgtccattggactcggtgttccttttccagccctgggctccgttctaggattccgtcggccagcgaacatcatgaggatggaactccttgtatggcctgctctgtttagccttcgttccccgggggctggccacatggatacccaacccctgagttctgtttcccaggttcccaggtgaatacttgaatcgcaaagccaccggatggaccagtggatggaaaagaacaccaatcctggaatgggagcggctgttgtgggcaatagcggtagccctgttttgagcatgtgccttttgtttcgttctgatatacccttctttcaacccttttagtttcttataggtcaaatttgattttatacatttgaattcgggattcgggactgttagcatataacagattataagctcgactgatattttggggctgggagcggaatgatcctcaactatggctggaataggatataaacgtcaaacgagtattatgctgacacccagaatagaatcaatatatttagttctccaacgctgatatgatatagttactaggtatcaataacattctatgttgaaaacaaggatacttcggaacaaatattgccaagaaagacatcatctttcactcatctctatagaccattcgtaacagcatagataaatcagaccctaagatcaaagagcctactacatcatatctccatctctcatctttttttcccctccaaagattcgacggggggcgccatgagtctctggctgcttttggggaccctccctgtaaacctccagggtcagaaatggccaatacataaagaggatctgacacaggaagtaaaaatatggggagagagtgattgcataagaactgcaagactaaagaggtaaaagaaataagtgtggacccccgaaaaaacgccagccggatgccactctgcatgaggtccccaaacaaccgtgttgtgacctacacggggggatcactggaaaaaaatggggcaggcagaaacaagttggaaatcacataacagagagaatttcagttttcaacatcaaggtcatgcgggtgctttttattttgcaacagccgagctcaagacttgtgtgcggaagaaggcacccttggtcttctcaatgacttgctggtagaccgactgaggggggtggttcatgataacagtgccctccttgtaatcgatcttggcgtcaacccgggtgtcgcgaataaggttgacaatccacttctcaccctcgtcctggttgagaccgaggcgggcggaaaggtccctaaaaaagaaaccgttagtctactgttcgtgccgattttcccaatgtaaataacttacttgatgtcgatacgctggtgaatcttgcagtagctctcggagatgagatggcgggcagcgtcaacgaaagcgtcggcagccgacacaaggaagaaatcgctgcgcagcacatcctctgcctcgccgagcttcttctgtgcttcctcgaaatcgaaatcgacgtaaagggccttgacgaaatcggtgacggggtcggtgtactcgtagtcctcctggcgcacaacgcggatcagatccttcaactgcttctggtagacaccggagtgcttgtgggggcggctgcggttggtgatgacagcggccgcaaggtaccgcaaaacccaagggcagctggtctggatggtgttgatgtaggcgggagagaagaagaggtcggtgaggacgtcgcgggcggggtcgtggttgaagaaggggaacagcgaccagtgaatgagccacgagcggttgttgagctgagccagggggttgttgaacaggcgagtctcaattgagtccttgaccttctgaacctcctccatcgcaccctcccagttggtggtcaagatctctgatgcgagcttaccccatgtggcggcggcaaccttgtcgttgtcggtggacagaacacggaactggtaaagcagttcagcggcatttccataactgccgcagctgtactggaaccgtccgtagtcgtagagagagttgaccatctcgttagtgacaccgtgctgctcctcgaggaaccgcaagttggcggccttgtcgcttcgtaggttgcccacgacctcctcatcctgcaacaattcggaaatcttctcgctctgatcctggtaatgctgtagcttggccagaacctcctcgcgcttcttcacaaactcctcgggaatcgtgtcggaatcgttgatctcctgccacaagttggcgacgtagtcggtcatgttggtgtgcttcaagagctcgtacttcgcccgagtaatttccttatcctcctcatcaccggtagcgctgaattcgagtagggggaagacgaggtgacggtcgaggtacgggatgagtcggggcagcaaatcatgctgagaggcgatatcctcggcggtcttaggctggtgagcagcagctccgctgagcatagtctccgcggtagggggggcgttgtctgccatattggatatcaaaagatggcagaggggggtaaaaggtctagagggggatacaaaggccaaccgcgatcaatggagaatttgcagattgtgcgggcgtcggtggccctaaaccctttttggaagtgggtgctgggaaagcggtggcagaaaatctgagcagaggagcatctgatgtcgctctccgatcttcccagtctctgccttgatatccccatattctccaaccaggtcctttctttgtgtcctttagaacgcaagaaatgccgtctcttctatactctagcccgccctcggccatgcgaaagcaggtctcggccattcctcttcgcgtcaactctgcgcagtccgtggcttccgttcagacatgtagttcattttccacattatgtcctcaggcaaggctgaaagcttcacgtacgttactttttgctcagtcttattgtgattgcttgatctcctaggaactacaagagcaaagccgaaccctcggattctgtattgtcttgtaaccaacaaagagagaaagaaaatgacaaaaaaacacgcatctatgctgtgtcggtttcgtttcgaccgaggaaacggcgcatgactaacccttcatctcagatcgtcctcaattctccctccctactcttcctacccgtcaaagccgtacctttctcgctcagctcggccgtcaagcgcaagccctgaagcaacaatctaacaccccatcggcggccccatccccagccacatcagacaagaaatccagtccgaccctgcagctcaccaatctcccctatttcgtccgtcgcactgcctccaatcagctgcctgtctacgtcgtcacaaaggccggcggtaccaaacaactcaccaagctccagaagaccgaaggcgatctagtcgcgctccgtaacgacctggcttctgccctgggtgttgttgatggaaacaagcccaatccggatgttagtctcaaccaattgactggccacatcattgtcaaggtatgtttgctttacagtgcaattaactgtcatgcgacagaaactaatatattggttagggctggcgcaaacctgagattttgaacttcctcaatgagcggaaattctaaatgctctcttctcttacacctcaaatttcatctcatgcgctcgcaattgaaggtctcaccaatatttcgagcggtccaagattcactctcaaaaagcatcatcatacctcttttgcgaggggtattctagagcatacttctcggagagagcaagaatcacatcacgtcgaaaacaagggaggggaaagaaagaaacgaacgctcacgatggtccctgatgtggatggatattatctatttccttgatctcttcttcctcttccctcggtgcataccttaatctcgttgcgggttgtttttcttccttttcttccttttcattttcatttggtgtttgtctcttgtttatccggtcgtgtcttctggcgtccacctgcttttttttttgtttttgttcccctgcttttcccatctgtaacactcaatctgtacattttcgatgactctatggatgctagtgcttttatattgaaatgactacatgcatttccattcggaaatctctcgggaaactcgtattgatgcgcagtatgtttgctcctgtctgcaattagaatgtaggccacgacctatttaatactatgcctgacgagcggatggaattgagggctgtctctgttgaaaacttcgatgtagctgggttgaactacgaatgtgaatctacaaattaaatgggaacaatgggcaatcaatcatgatgcaagtatctctcgatttgtgtcgagggtattttgagcattgtacaccgaatcagaacagaacgctatctcacgagaacaaaaataaaatccccatcacccaccagcgcccaaaagataagaatagaaagactgacagtcgacatgagagtacaaatgacatgagagaaaatcaagattgtcgtatatgctaagtggaagaggatccgattcctccaaaggcgggactggaacgaaaccaacctgtcaccagcgcattggaggttcatgcagacatcatttactccgccaaccgagcatatgtgaggagttggcgaacaacaccaccatcgatgttggggaggagtagtgcacctagcagactttcttttctgggaaggattccggatgggatgttaagaggggaggtgttgtcgacttgctttgatttttcggcgagtcggcgtagaatccccagtcctcgattgacaatcgagctgaaggcatatgcgtcggcttcggcctggcttctttgccgcatgttgatttgtgggattcgttctgtgcacagtgcgcaggaaagtcgcaggagatggacagcgaacccatcaactgactcaagccatgctttggcaagagagccatcggcaaatgtggtgagaacatcggccgacaaaagaccttgcatcaaaaacactttgcgtgcgtccacaacagccatgggctttttgtcggggacacaggatatggcaagcccaaacgcgcgggttaacaactctggctggggaggtgcagacccatcaccagagaagatggctttgaagaaagttcggttcgggtcatctctagccaacattttggccagcccgtcaacggcagctggggtgtatcgatcaaccgaagagttgaatgcagtaaacatcacttttccagcgggtgatatgggttcaggttcaggcgagaacgccaacaagaaaatcaacagattcagcgcctcgtccttgccgggaatttgaacaacatgcgccaagttactcagcaagatcactgcatccttcataaaatctaacgtgttgtggcttgtccgcaggaacatcttgcgagttcccatgtaacgaaagacggaggaaaacagctgagcgacaggagggataccgagagataagaaattcgtctcgctaaacgagaaattgcgcaggatagtggtgatacagatgagtcgatcgacggcccggtctagttcgtactcaatacttccaaattcgggaacatctaaaagcgatgtgttttcagactggcagtcccgtgtgacttgatcataggaacggagagtcatagtatccgactcttccaaggtgtgctctgctagaaggtcggcctggtcttcagcgcagtcgatcaggctctctaccaagtcatcacaattctccaatgatatctgaacagatggttcaccagaaagtgttgtgagggtatccaaagcaactcgtatctccgcgtagatcccggacttgagcgccattgtcaaggcgtggatatcgacaattcctagttctgcaaagcctggcacatctggctttagcctcgaaatatcctcgccaatctgatacatctcatcaacggcaatgggcccgtggaatcggtttcctttcagaaccatgggtttgaaggtttcctcaatagggcgttttaccagctgctcggatttttgttcttgttgtcctggctgctgttggcccggaacaggcgtaacacccttcacagattggggagaaggagctgcgaactgtccggtggcttcggtgagtggaacagctggttgcgacgccctcgagatgcttgaccggtgtccggcctgtgctggcctgctttggcttcgtgcgtgcgttggcgttgcaaatccattcactggggcattattatgaattggcgtgtgattctggggggactgtgctatcgcctgggcctgctcaaagcctggattaggcttcactgaaggagactggaattgactaggcggccgctgtatgccgccttgatgttgcagttgttgctgttgctgctgctgctgctgctgttgttgttgttgctgctgctgttgctgttgcaattgttgctgctgctgtaattgctgctgttgcatttgctgctgctgttgctgcatgtggtccgccatttgtttttgttgtgagctgatgaaagcttgttcgtagggagccaaattccttgagtggtgagcttgaatctcctgggcagccataggaaattgcatctggggaaattgcagctgatgtgcaactgctggccacatattcgttgctgtgacctttttcgaccctcccatcttcatcacggtggcgtagagctgaacgaggttgatcggacgtccactgacaataggatttgtgtccacagaaagattctggctcatcatgaatttttgcaatgagcgcaaaaatccttccgggttactgggttttgggacgttcgactgcatgttcggtggcatttgtctcataccccccatggactgctgaggattacccatcgggttcatgcctccttgaacctgccgtccagccatcgtggcattgggattcatccgtgactgttgctgcatggcatgcagccgctgttgttgattcgctagagcttgatggtagccctggggtacttgttgcatgccattgaactgcggcgcgagcatcgagggttggggaggtcccgaagtcattccaaactgctgcgcctgcataaagttggcgttctggggcgtatttacgcgactgccgtgatctgactgcgatggggacatatggggtccggggtgcggaccagcgggcgagaaggggctcggagaagccgttcccaagcgagcgctttgctgatcaaagtcctgcataataggcgaatgcgttacattcggagacgccccctgctgaagatgctggtacggcgttgggtgttgcggaaattgcggattgccgttggtcggtccttgataacctggaaacggctggtgaggggtctgagatcgcgaccccgttaagccgcccggtactggtcttggcgacatgggcataccatcttctggccgcgctcgcttggatggaatcacttggtttggattgtggaagcctggggaggcgttccgcggcacgccattattgaacatgcggaattgagatggatcctggggggtgggggagccatgaaggaacgcagtagagggatctatagtggatggatgaaaggcgccattatcctggccaggaatattcgaggcgtcgagccaggcattcatgtcgtgcggttttcctaacccatctacctaggacgagtcagcacgcgaacattggctcatgcaaccatcgctacaatgtgcaaatatgtcatctaagaatcaagcaagtataggattcgatccaatgatggacgatcaggtggacgcgtcgggagtgagatgtttgggagtcgcgcccagacccggtcgcgacacgggtcaaagagaaggtggggagggaaggcacaaccatggggaatattagagataataagggggggaaatgaggggagggaatgaggtacataccgataaggctggagtgacttgaattccgccttttatacggatgactgaagccgggtcccggaactggcagatggatatgaaggggacagaggttggccagggaaagtcacgtggtgtggaaacctaaggcaacaaaccacggaggaggacgggaggcaaaggcgtctaagatgggataatgggggtgggaagggggggggaggtcagaggctggggtaagctaaaatgttagcaaatcatagaccaggaacgtcactcttgatctttaaagagccaagctataataatgggaagctcgttcagaaaccacggggcaaatgacggttacagaacaagggcaggacaaaagggggtgcgtggccacaacccaataatctcaataccgtgtaaataataggaggagaacaagaaaaaaaagcaagcgacacgatccgatcaaccgaaatggtgtacttaccaattcacatccgttcagttagggatgaagggggaagtggagagaggagagggaaaattactgacaggtcagagctttcagtaacatcaacccggagtgttgtgcgggttacttgtgttactgggttagttcttgtcttttagaatctcgtcctgctgcagttttcttcgtcttttctcgctcgtctctttctttctcttttttgggcgttcatttttccccctttgggtctggatttcccattgggtttagttatcttgttcagagcgggtgttgccagcctcaacctgcatatgaaagagactggccacacatcggggaaaataatggggaaagccaggcaatagtggtaatatgaagggaattctctttctgaaagaaaagtctcataaaaatccccatcttcccctcggatttggtgaatcagcgaaatgatgatccattccaacggtctgcccgagtcaggttagatcgtatactccaaccccgatatggtctgaggttagcagccaccctagggataaatcccaatgagaaaaaattgccacgaaaaatggactatttccagaccatcatctggggggaaggggaaaagaaattatggaggagagaaagagagagaaaagatctagagccgcgacggtggccagcggttctccttatataaagctcgggctagcgtctgataatcatgtcgatgcgcgcccaatcctccgaaatcaccaaaaattcgaggttaacaactaagagtggattgacctgggttttctagtcacccccgtgctaggatccgactcgatccgcgtgggaaatcatgacggctttggtgcctgtcccacctaccgtgtctcggcctactccaccactagagatgattggatcaacttttcttcatttcccttctgtagggcttcgggggggcaagcttgaggtcatgactaactccaaggggacggatgcgtgtaactgtctaaaggcccttgcgcatggcggtccaatatgatattatcccacgtcgaacctgatcaggtgtccaaattgacatacgttgtgtatctacatgtcactagatgtaacaaataccccaggcagagcgtgagatcctcgttattggttctaaggctatatattccgcagtagccgctagcgtctgacgataaatttggattgatacactcacctggacaagattagtacatattgggtatctgggcacgatacaggaggattatgattagagctatcaaggatttccaaggttcggtgtaatttatcccacagttctgggtgagattattgcattgcaagttgacgggcgcttggtttagtagtgtaccgtatcgctaataattgccacaacattgaatctttaaccttcaaatgatgcgagtaaaccacatgtacgccgtattgtagaaaataatgggactaccaggatgtgggacttatgatatatttttcatgaccctaacaaactggaactaaatctacggagtacaacgaactgttggcaagaccagtcgacatcacgtgatggataagcttcctgccccatagcatcgaaagctccagatggctgaactccgagcccttcacacagcgcgtcattcaccaaccatcttcaaaactcatcacatttccttccatttccagctgatacacatactctcctttctcatcttgctcgctatccaaactatccaccatgggagacgttgccgtggagtacccggcaaacaacgtcacgcctctgaccaaactcgacgcccttgccaacttggattccctcgatggtacaggggctgatggaaatgatgaatatgctacccttaagaggctacagagacatctcgagtatgtgtgaccattatcggatggagtggtctgtactgacgtcgaacacaggtatatccaactgcaggaggaatacatcaaggatgagcagaggtatgcttattgagttctgttattgaagatccgtatcagtggctaactaccgtcgtccgatacaggagcttgaagcgggagctggttcgggcacaagaagagatcaagcgcatacagagtgtgccattggtcatcggacaatttatggaggcaatcgatcaaaagtaggccttttggtatctggatctctaggcgagatcatcgtttgctaactcacttctcttagcaccggcattgttcaaagctcgaccggttctaattacgtcgtccgtatcctctccactctcgaccgcgagaagttgaagccttcatcctcggtcgcccttcaccgccactccaatgcccttgtcgatattcttcctcccgaggctgattcctctattgcgatgctgggtgagaacgagaagcccgatgtgacgtacgcagatgtcggtggtttggatatgcagaaacaggagattcgggaggccgtcgagctgcctttgacgcatttcgaactctacaagcaaattggtgggtagttatggagatccattgcgggtaatgggtccgctaacaaatttcaggtatcgaccctcctcgtggtgtcttgctctatggccccccgggaaccggaaagaccatgctagtgaaagccgtggccaacagtacaaccgccagcttcattcgtgtcaacggatcagagtttgtacagaagtatctaggagagggacctcgtatggttcgtgacgtcttccggatggctcgtgagaactccccagccatcatcttcattgacgaaatcgacgcgatcgccacgaagcgtttcgatgcccagactggtgccgatcgtgaagttcagcgtatcctactggagttgcttaaccagatggacggtttcgaacaaaccagcaacgtcaaggtcatcatggccaccaaccgagccgacaccctggacccggctttgctgcgtcctggtcgtctggaccggaagatcgagttcccgaacctgcgtgaccgacgtgagcgccgattgatcttcacaaccatcgcggcaaggatgtcactgtcccccgaggtcgaccttgacgccttgattgtgcgcaacgacccgttgtctggtgctgtcattgctgctatcatgcaggaggctggtctgcgggccgtccgcaagaaccgttacaatattatccaatccgaccttgaagatgcttatgccgtccaggtgaagactggacaggatgatgatcggtacgtttcttgtttgtttttgggggttttctatgtcactaactgggttcttgcagtcctgacttctaccggtaaatgcttgagtttctcggggacgttggtacaagtggtaaaagcttggttttcctcaccagttgtattatcaataatatgcgccatgtgtcacaatgtttggattatgtgttgatcttacggtctccgtttagattgtagatgtagattgtaaattacaccctgcccgtagaccacttgcttgaaaatgcgtttcgaatgaatgttgttttaaatacgttggaaattgttccctgttattcttctatcgaataaccaatctgattgcagacagtgtgtatatattttagaagcggataacccgaaattcgcgatatatacctccacttacaaccaccagaatctataataaaaagcattcaagaaaccaaccacacataaagcttgacacttgccacttatcactcgaattaaaaaaggccacatagaaccatatgacaaggacaagcatactaatcggtacattcacaatgtgagcttggttatttcaatccgataatgttcctcccggtcgcgactactactttttgctttttcttcttttggccttcaaaggttacatacgttcttagtacgcaacacgttagtatagttcaatatatatttacctatgcttgttccaagtagtagttatttccgatatgtatacggacattacggagtactccgtatgctaaaagccccattataaagttttgtttacccgcagttggtagctactacaacatctgtcgactaactaaccactgtccttcatggggtttgtagagaccttgttctgatttgatttaaataccacgttcgaactaaatatcccgaggagcttctttcaaggctggttcaaccaattcagcaatcccaattcagcaatctcttaaaacaggagaatctgaaaatcccatttcttccgcagtacgatcccgaatccgaatctatatatttgcttccacgcaggccttcctcccacggtcctctgacaccgcaaagcttcacctggcgggcgctgctagtcggactgctagtcgggatactgatcagcctttgcaacacttattatggcttacaaaccggggctggtgctcaactacctactgtgtcggctcttctggggtatctagcgattggagcacttgctaaattcaactttgcaccgctatcgaaaactgaaaatgtcctgatcgtaagcactgccacggcgacgggctgcatgcccgctacagctggattcaccgaggtcatcccagcgctcgaatatatccttgggccaaacgagggaggcccattccgactggagtatctgcagttgataacctggtccctgggactgagtttcttcggaagatgatagcgaagatatacactcttccagcatgctagcactcggtaggagacacatgagctcaaatagtggttatttcccggtggtgggcttcattgtgtcaatactagcctgtatccttaccacacattccgtattcggagacaaaatgccttcgtattacacggttgtctcgatcctgcttgtcctggcggtggcgatgactggcattcgtggtctggcggaatccgacttcaacgcaggaagcggtttaggtatggcctactctgtcagattatatcgtcgtcattccagaatatcatctctggcctgagatcgactaataaatatcttgtgtgaacagctgcccagctggttttggccgccataatcccccgctcaaaccctaatagcgtgatgatcaatatcctatctgctgcaatcgcaaatggaggtgctaaccaggccggcgatcttgcctttgacttgaagatagggcaactcatcggtgcgccatcagaagtccagacctacggccagataataggatcgattttcggcgcgcttgtctcttgcttcacgtatagactgttcaccaaccgattcccggttccaggagacttcatccaggtaccaaactcgttcctgcaagtcagtaccgcgagaatggtcttgaataaagccttccccctggtgtgggtggttacgccctgggctttggaattttcctcgccatttcaacagtggccaagatgaggtttcaagacaattggtggcatgtttatattcctagcggagtttcctttgccattggtaagccgttctctctattttgggaagactctatttatgttaatgatgttaatatcgattcacaggcatatctactccgagttttagggggagttttcatgtgggcatacctccgccgcgtaccatccaaacgcctatccattgtagtgttagccagcggaatgttgctcggagagtctctcggcagccttggagagcttgttttattctcagtgaatgctcctcatctcgggtgattgtgggagtttgtgacttggcgcagaaatgtgcatacatatcacaatgtagctataaaataggggattgttacgcctatgtacctgcaatttgtatataaaccactaacaacattaagtcacttttatcacaacaactacttcatcgtcgacaactactttaataactacttcaacaacagctccaacaactgcctcaacaactggtctatcataatcaagggattaaaacagagataagtctggcagaattgaatgggtgccttctatgtaaggcgaggtagggtggttgagttatatccccgaggtcctccttccaaggttaagcttcacctcctcctaacctttagggtgggcgtaccatccacgtgatcacatagctaccttagtcccgctgctgtatacatcatcattcttcccctgagctactggccaggctctaaggaacatgccaaaatggccgcacaccatcaatcttctttggaagatgtattatggaagtgaatcctaccaggttatccaagtgatgccaccggatatcgtcgcggatgatttcgtgctgctctcacttccgcccggtggaaacccaataccatatgtgtactggaacattggcgtgacagagccagagatgtgggagaaggcaaataaagaaggcaagttgcgagatttacctccaacccacagtgctctctatgcgccagcaattgagccaatccttcaaaccggaatcgaaggattggctttgtctgccttgacattccttgagattatttgatgacatgcagcacattacgccggtgaagcaaaaagtacatggcatttagcatgagcagagagaagaatttaggatattatatgttcatattttgtcccagggccttctagtgtgattcgtagaattcatctttcctattccgtatatgcctgataacacatcaaaacacatcagaactagagtaatacccatttaataatgctgttcagcgtttcaattcttaatatacatcggaagaattttttttatattaatctccagccttatacttcgtccccacaccgctgggaagctctattagctataatcctaagccagccgcttgatatgaactgcccaatacgttagacttcaataccgttagcactagaatcctgacagaagctgacgagttgagctaaagaccacagagatggtaaagcttagtgttctgcattaatagaaaaaggccccatcggcagagcacagacagagcacagacaaagacagggcgaacggagaagcgggttaacgaaaaagggagaagtcatagggcgacgaggactttatagaaataggcacggggaaggctatgggcgctacaccgcatcgtgcaattcaccgtcaccagagactacgtagcattcactcattggagttggcagtaaggcagcccttaagcatcaaaagggcacgcgctcccttgaaaggcactaactaagtggagtatttctagacagtttcggcccctggactagatagtatagacatatgctgagctacaacaataccccgtacactctaaagattgatggctgtatcacagcagggcacgagagcttgctgtagaacaataacatctgagcgtagccttttgccacatcgaccgtcctgcagctgccaggtacgcgggaggagtgtcttccgaccagtccgaccacggcgctaactgcgcccaggcaccagctaaacacctcccctgctcaggactgattttatatgttgtacggagtatagtctagaggagtcatagtaacgtggcgaagagatgggtctaagaaacaagaaacgagaaacattcttcgtacaagttaggagggcaatcttccgccatgtcatgagtccatcgccaaaagggggttagtgtgaccctcccgcttccgtcatcgtctctccagcctccactcccccatctaccatctcatctacccttatctcctccttccttcccatcttcaagtcattctcttctttgcatccaacatctacagctttcttttctcatcttgaatgatgaagtcattcactatcctagcagcttcggcgttgctgggcagtgctgccgccgaggttcacaagctcaagctcaacaaggtccctctgtcggagcaactggtacgatcatcccatcatccctattgccttcacaataccctggaagctgatcgattgataggacacacacaacatcgatgctcatatgcacaacttgggccagaagtacatgggaattcgtcccgagaagcaccaggacctgttccatgacacttccctgaaccctgccagtggccacaacgtgctggttgacaacttcctgaatgctcagtgtacgatagtaccaccaaaatttaggtcctgaatgatgacgctgacctttccagacttctccgagatcacgatcggtactcctccccagaccttcaaggttgtgcttgacaccggtagctccaacctgtgggtcccttcttcgcagtgcagctctatcgcctgcttccttcatagcaagtatgactcgtcttcttcgagcacctatcagaagaatggctccgagttcgagattcgctatggatctggcagcctgagcggcttcgtgtctaaggacaccctccagattggtgacttgaagatcgagggacaggacttcgccgaagctaccaatgagcctggtctggcttttgccttcggtcgctttgatggtattcttggcctcggctatgataccatttccgtcaacaagatggtccctcccttctaccacatgatcaaccagaagctggttgatgagcctgtgtttgctttctaccttggcgatgccgacaaggatggtgacaactccgaggctacttttggtggtatcgacgagagccactacactggcgagctgatcaagatccctcttcgtcgcaaggcgtactgggaggtcgagctcaactccattgcccttggcgataacgttgctgaacttgagaacaccggtgtcattctggacactggtacctctctcattgccctgccctccaccatggccgagcttctgtaagttggattctcgcttgccttcgtaatgtaatctgtttgctgacctattccacaggaacaaggagatcggtgccaccaagggctttactggtcagtacagtgtcgagtgcgacaagcgggactcgttgcccgacctcaccttcactctgggcggccacaagttcactattggcccccacgactacatcctggaggtccagggctcctgcatcagcagcttcatgggcatggacttccccgagcctgtgggtccccttgctattttgggcgatgccttcctgcgccgctggtacagtgtctatgatgtcggtaacaacgccgtcggtctggccaaggccaaataaatgcccgacggccggtgagctgtgaatatcagagaaccaggtgacacaaggagattgcttcgtatatacatgtcgcttctgagttgaacgtatggtttcatagcgcacttcattcgcctattgctaagtagcatgttgattagggtttttgtttttgatcgctggcacagccccttcgttaaggcctgtcgctcattggtactgcaaatggatatctttattggttaagatctacttattgcatctcattcttctatcgaagagtcttccctcgtagtggccttggttcagctggatccctcgataaattcctagatgtaagaacttgagttggcaattggttggagctaatgctggttaagcatcaatccacagtcaaatttctaatacgtacagtcggagaaaattagtagtatgtcactacgacttagaatatgaataaaaatatgtcgagggctatttgatcaagccatcatatcataccattcagaaaaataagatacttggactaaagtagatcgcgcgccaattaatacgaggaggtaccggctttcaagtactggtatgacataagcggaagtagctctcaacctggatcgagtgagtccccgcacaacttcaatgagcttcccttttctttgatcgaagtccacattcctccttcaatcttctccgccctttcaaattcaagcgacttaattcgcctggtgtgtgatttgcctcggacctccgcgccaggttgtgctaggcgcacggttttcttttcccatccgcgcttggagtggcgattctcattgcgctgccgaaaccaccattcacatctatttattcctctgatcgatcttggaatactgagtcataggctggaataccatcatcggaacccgatattatccagctcaacacgcgttgcgtgtcggtgatggcgtcgtagccggaaccgcacgcgatcactccattcggcccacacgtccttgacgcgcgctgtcaacataacaaggacacagaatacattttggggaactgagcattagtacattacatcgcctgggggcgaacgaagagcaacgatgcttctccgtctgcccaccggcctacattacccgatcaccgtgacgtcgctgctcaaacagcctggcgacacgattgagaaggatggggctttgttttggtatacttaccagactaccgtcaccgagggtgatggactgggcaacaacatcgaggtgaaacgtaggttcccggctagatttgaatcgactattgatggagagatcgttaaatggcaaatccaaaagggagacgttattgatgaaccgtgagtataccgacccttgtcttttgctatccttttctaatttgttgctagggtcaatgttgtcgaaatcgatgagccttgcgcgcacgagattcagtttggaggactttgtgccgagtgcgggaaggacatgactgagtatgtataagcctttcagcgggaattgagcttttctaacctgtctcgtgaacagatctacgtacaataccgaaatcacagattccatgcgcgctccaatctccatggctcatgataacctcacacttacggtcagcaaaggggaagcagctcgagtcgaagaagatgcgaaacgccggttacttgcatcgaggcgtttgaccttggtggtggatcttgatcaaactattatccatgccactgttgatccgacagtgggggaatggagagaagataagcaaaatccgaaccacgaagctgtgcgggatgtgcgacaatttcaattgatcgacgatggacctgggatgcgtggatgctggtattacatcaagctgcggccaggactagaggagttcctgcaaaatgtggctgagatttatgagctgcacatctacactatgggtactcgtgcttatgcccaacatattgttgatatcattgatcccacccgcaagctcttcggagatcgaattcttagtcgagacgagagcggaagtttgacggttaaggacctgcaacggctgttcccagtggacacaaagatggtggtaatcattgatgatcgtggtgatatctggcggtggagtcccaatcttatcaaggtctcaccttatgactttttcgtcggaattggtgatatcaattctagtttcctcccaaagaaggaagatattggagcgaacaagcctcagatcgaagcgaaggcaccggagcagaccaatgaacaccacgtcaatggcaaaacgcaagaaggggcccaggtatcagcattagaacagctggtgaccatgggtggtggagacagcccaaggctcctccaggaacagaccgatgcacaagaagagacaatattgcatcaggtggaggatcgacctttgttacagaagcaaaaggaattggaggcagaggataatcttgctgaaaccaatgaagtatcgtctagcattgaagaaacccacgaatctgcgaaaccccgacatcacctactcgaggaccatgaccaagaactcttccagctgcaaaaccgactcgaacaagtacattctcaattctatgatgaatatgacaagaggcggactctcgcccttgggggtcgggtggctgctctagggggtcgggtagctgctttaaggggagagaaggtttactcaagagacaaagacgtggatcttaaattggtccccgatgtcaaagacatcatgccgcagatcaaacggcggatccttggaggggtggtgcttgtattttcaggtgtccttcctctgggcatagacttccagaatgcagatatctcgctatgggcgaagagctttggtgtgacgatctcgtcaagggtgaatgcccgcacaactcatctcgtggctggccgcaatcgcaccgctaaggtgagagaagctactcgctatcccaacatcaagatcgtgacgacacaatggcttgtcgacgcgttggttcagtggagacatgttgacgaagaaccttatctcctcccacttcacccagacgaccgaggcgaacccctgactccgagtgagctcgagcttgaaacatccatgctctcgtccgcagacgaggatgtgacagggccccaatggacacaagaagatgacgctgaagacatcttcaagtcattcggcttggacgacacatcgccgatcgggtatgatgcggacgagcaagccgctgtacacgatgaactcaaggactttttgggcagcgatgacgaaagtgaaagtgacaacgaatccttattagacgaaccatccataggaggcaagaagcgtaaacgcaacgaagacactgaaagcggcaccgacgaagaagagtctggagacgacgacggagatgaccatgacaaacaaggctcccggctctcccaacgcatcaaacgctcctatgagcgcaacaccaagctgcgagaaattacatcggctcctgccaccggtagtgaccaggcttccccagaccgcccccaaacatcggctgtggagggggagtctgactctgagacaccgggaactagcagcgctcccaaggccgactatcccgacccagatgacgatgacgacgagctggaacgggagatgcttgctgcatttgagggcggagggtatgaccctcatgcagaggcagatcctgcagctgaggacggatagagcactcggttgattttgtgcattcgtttcggattctctttcttcttgtcataaccggagggtgtgcggttgcaatgcgctcttggcatagcgacggcgtttattaggtctatttgactttgcgtgtcttcttatctgtagttctcgggaatttgtgtatctgaggatcgatgtacaattcagttcaatatactgggattatgtctgcactatggagtactaaaacgatatgtctatatatgtagattgaaatatctcgtttgtatcctttcagaaccaaatcttatgcacaccaaaaagaaccaatgctatgtcgcttccattcaacgccacagatgcaaaaaggtggtatcacaacaaaaacaaaaaccaatgaaatcaatcataaacatcccgattcacctgccacgacataatcatcatccaaagatagaaaatcgtgttcacaagctcgagcgcaaaggcagttctccagcaattgcctataaagtcagtatacaaaacatacaaaagagggcatagaagagaactcacaaatagtactctgcgtcaaccaagccaaggtgttgatattattcccccaagccttattgttcgtcacgtagatttggcaattatcattcacattcccgacaacgccatacagctgcagcgaagtctcaatcagacccgtcagccacagcacaaagagaataaagctgccgatgatgataatgcccggtaagaggaagtggcgcgctgcaaggatcataattaggaatatgaagcacacgccgagtgcgctgctgacgaccatgtaagggaagagcctggagatgttagtatagatcctgtattgactatgacatgtgggaagaatgtggggggtaggttatgagtatgcacgtagccacacggataatggataatatagagataaatatagatcacttaccatggcgtcccaagatgcatttgtgattgcacggtcatgaaccacgagaatatccccagacatgtcgctgcgcacgatagcacaaccataatccagatgttgagttggagttcgggccagtggtagcggcggcgcatttcgcgacgcctgcggactgccattggattgcttgtgggatgtagatagagggtttgaggtgtgtgttggattgcgatgggtgatggagctcgactgcgattgtggagtggagtggagtgtgtgctttatactggtgctgttgtatactgcccgacgcaggcttggatgccctatattttgttgcgggcttgggatcggatggccagatcgggagtcaagtgagtcaagtgaatcgagtctgaagggattggtagaatcctattgtttcaggtgaggcgcggtgactgggacaacgcattgggcgcccttgagcgctcgaggccctggggattttggagtcggtgcggtgtggatatatttacaatcgtgcatgaatttctaaacgaaagaaaaggccaagatatacagagtaaagaagaaaaattaagcaaaagaaaacaaaatggccggggagggggaaatttaggaaaatggggtggcaggggatttagtgtcgttccctcggactggcagcaattctttgatctattttggactgaatcctctaaatctcaattaatatcctcttttaatccctttatcaaatcgtctttatagaagagtgtcacccaatgcactacgcaccagcgaacaccctgctcgaatggtctccgacgcacccttggactccaggctggggttcacctcgaccaagtccatcgcaatcagattcccggtctcatgcacagcctcacagatgaagtctccctcacgcaacgtcagcccaccacggactggtgtaccggtactaggagcccactgcggatccaacgcatcgacatcgaaggacaagtgaatgggagtgtcgttaccgatgtgagcgagagccatttcgacaacgcgaccgatgccatgactagcggaggaagaggtcagcacgaagatcaccaccacagcccagggaaaacaaaacagaaaacataccggtcgatatcgtgcatactgaatgccttgataccattctcccgcaagagcttcttctccccgcggtcgacatcgcgcaacccgatatagacgagcttctgcgtgctcacgatgtgctcgtcctgcatccagccaaagatatccttcttgtcctcccgggccagccgagtcaggaacgccatcggcataccgtggatgtttccgctttcgcttgtttcgggaatgttgatatcggcgtgggcgtcgacccagatgacggccatttcgcggcccagtcgctcgcggattgcctttgctgtgccggagacggtgccgatggcgatggagtggtcgccgccgagagtgagtacgaatttcccgtccttggcgtagtcgtagacctgtgagctgagcttctcggtgacggcgctgacggcgcgtggcttcttcatgcctcggtggtcggggtcttcggcggggatgtcattttcgtagtagtggactttgctgtcgtggtggacttcgtagtcgaggtcttcgctgagttgggttaggaggcctgattcgatgagggccatcggtgctgcttcgacgcccttcttgcactgttggggtttagtatgagttcatgagctatagctgtagttccaccgggtgtcttacctggccgccattgaaaccaacggcaacaacgccgagctggttcgggtgtgagaggaacctcgaggtaatggttgaaggttgtgtcattttggagaaagcagggagattggaagaggagtcaagaagaaagagagctgttcaggtgttgcgatcttgaagatctcgataagaattaaaatgtgggggctctcgataagaatatctgaagaatcgtcaggatagtcaggctgatgtcgatttgtgaaagaaacagaggataactcttcctttaaatatctcggacttgtcttacaacgtttctcacatggccccgacttcaaccgggtcggtgtttcattccttgcgcgatgcccgcgaagtcgctaaaaactgcttttagcgatcacagcgactccgccggatctccatcacttccgttaagtacaggttgaggagagcgcacccctttagggccattcggtgtcccacaagcctgggtttgacctcttacagcgagagataggccggcaattctgtcatttcatttccgggctttgatccaagcgcgtggggtggtatcggaggtccgggagcctacagggaagagaataatcgcaaggccaccgtctcggccacggtcatgagggtatcattgatgccatagaatacattccatactatactatacaagctatctcaggatcaactctcggagaacctcttctgccttgagtgcctccacccggcctttctcaccattgcgcatcatttgccccacaaaccaacccagtttacccagctgcttcttgctacggatctgctcgaccatctgcgggttcagcgcaatgaccgactccgccagagctaggtactcctcccgcgacaacggccgcagtaggagattctcctcctccagtagttgcggcactggccgttggtccccgtcaaagatggtggtcagcactagtttggctgtcgggccggtgatgagtttccgctgcagatggtcgatgagatgcgccaaggaccgggctgggacggtctccgcgtcccatgcctgatctgccttagccaggagagcgcctagctcgtgcaagacccagttgctcgccactcgcgtgagaccggcgcgcgttttgtcgtcttgatctacttgaagagtgcggaggatatccaccacatcgtggtagtactcgagacgggctccgttgtccagctcgatgagtggtttggcatcttcgattggcagattaaactcggatccaacgagcagtgtaagaacagtgtctggtgctgtcggaatagacgctcggagactagagagcaggtcctctccaatgaccagtggtggaatatcaggatcaggcatgtagcggtagtcgaccgagccctctttgccgcgaagtctgcgagtttccgtgctgccgatcgtccacccacgtgtctctccttctacaacaccgccactctcgagcacctcgatctgtcgattcttctcggcaatgatggcatcctctaccgccttgaagctgctgaggttcttaatttcggtacgctgacccagcccgctgattccatcgtactgatattgtcccggtgcttcgcctcggcgtcggaccgagacgttgacatctgcgcggagaccgcccatttccatgcccgtagtcacggcaccacaagatagtagaatggcttgcagcttccgcacgcatgctgcggccgttgcaggagtgtggatttgtggcatggtgatgatttcgaccagaggatgggacacacggttgaagtcgagaagttgtcttgagccccggtattcctgggatttggctgtgtcttgctccaactggagttgcttgatgtcaatacgaatccgttcaccgtcctccggggcgattccatcgtaatcgaataggtcaacgtagccatttcgggcgaatggttctagagcacgtaagtatattccgcgggttgaaggacaataacttaccatagtattgtgtgatttgataccccgccggctgatcctggtagaagtaatgtttccgatcaaaccgactcactcgctgtatctcacaattcagtgcaatggcagcgcggagagctggtaagagagtcgcgatttggaatgcctgtctcagatcagccctgtcgcgattccacagcattgtacacgataacactaaccggctggctacccgggaaggccagatcgaacaacgcaacgttggaattggggatatcgcttatcgaagttgccgcccctattcaattgatgagacgccgactcgtagtctccgaggtaaaaggcgtactcacgagaaaacaatttggtctctgtatccaattgcgcgtggatctccacgcccactgtcagttcccattcttccctcgatgcctcctctgtttccttgcgttgtcttttgtgtgatctgagcgctttggcttcctccttgagttgtttgcggaggggaacgcgatcggcggaggctggcggttggagatagcgggttggcgcggaggagaattgggctttagtggatgaaagggctgaccgagtcaagcgacggacgcacagagagcggagcgtaccgccaccaatacatgaccgaagcatagagatattggactcgtgttgagtgttgagtcttgaaagacgtgaatttgcgggagaagctcgggacttggcgatctgcagatcattggacttcagtctaaagagacatattcttttaaacaaaccctttcgaatatcatttttgtacacttacaatgctgtgagaaaaagaggatattattataaagttcttttaacactagcagagttgtattcagtcaaaaattcgaggtgttatacaccttattcacccgcggagtgtagcaacgctcttgatttcgtataaaatcaagtattaatatgttataagacagtctaaacatcataaagagagaaaatagacctttcctaccaagacagcgaaacctgatacttcttctagtgctctatagtgtcagtcttaagacttcaatcccgcctgacaatccatgcatgctcaggatcgtatgatgaagctcggcagatagctgaagtcaaaagaagaacagggtgctaatataatacttgttgcctgttaagtgagcctgttctaggttggatttgatctctcgaactatataaccttctcggaggagcagcgattggctcagtcgccacagtaaatgttttccatcggctcgaaatgcggggattaagtctccacaccagctagaaagaggcattggaacgaaatatcagaagtagaagactatcccaagggatagaaatagctatacgcaatcagtgacataattgatataaccttctacgtcgaaccgtggacgatagctgtctctcagccatgtacctgttgaaaagatacaaatcgactgcatcgagtcgaccgctcttaaattctagctattctatttctactatataaaacatatcgatagagactaatgaatttccatctgccatgttattgtagaagatacacacagcaacaattcctagccaatcgccctcaaggcagctagaacagaatcaaaaacagtacgaatatcaaaaagcttccgtttactcaagtcgagggaataaaaacgccagacaccctccagttccacactggatcgcaattgaaaggctccaaaaatcccacattcaacgccagactgacagacctgctgcccggattacctccacataaaaaaagtcgttatcacataacatcagcacgtgttaaactcacacattgatcaaatcatcaaatgtatcctccgccgagaacgaataagacccctcagagacgagcgaagcctccgactcccggcgcatctgctgctcaaacgcctcagccgccgccgccgcagcgggctcaagctgtagaggatcatcaaagccaaaagacatggccgtcggcgccggcgcagacacagccaccgccgccgtagccggagcttgcgtgtgttcgaggggagaaactgagacagaggggttatctattctggcgggcgattccggtagccccgcaggcgcagcgccatctttatcggtaatcttcttgaccatctgggcgaggtgaagtttaatgggctcgtccccacactgagcatgtttcagcacctcgttcttcagccccaggatctccgagcgcagccgggcaatctccgcaaccagctgctccttcttctcggactgttccttgaagttgaattccagctgctgggtgtgttccttctttttctggcgacacttgcttgcagcgagacggttgcgctcgaggaacttggcccgcttggcgcgttcgtgtggggcttcgtcgaagtccgggctgaggctggcggtggtcttgtattcgcgtaggcgccggtgtttgctcacgctttccatcatgtctagcgtgaggtcccggccttggtcatcgtatgggggcggggttggctggccattccggacctgggcgtttttgaggtcccgctcgagtgccgaatgggcaaatgctgccgagtcggccttatcccacccggtggccattggtgaaactggactcagaccccagagttggtcgtcgtctggaataggaagacctaggaaatcgcctgagaaggagcttgtgaatggtgatggatcgatgagattggttgcaaggccaggtaaccctgatggtagccctgatggcattgcagatttgaggttagacatgtcaaggcaaggaagctttagagcgaaagttatgttccttctaaaacatggaagggagagaaagcaagagagcacactaaggaagctaagacaggctctcttgccctaataaccctaaacagtcaaagtctgtctttcccttggaagcaggaatgtggacggtgcctgaagaatcgcagagagtccaggtgcagtcgacctggttggagccacggtcggacaagacttcctgcggtccagaagatccgagcgaatggcaccggatgagatgatattcgggtgtcaccaaagaaaaagaaaggtagaagaggaatgtcaaaggataaaggaatgtatgaatgtatttttatcgcggtcgtgccctggcctactaggtaaaccccttcaaccctaggatgcctatcaaaacataaaacaacaaaaacaaggtaagagatagaagtgaagaaaagaacggtatccaacgggattcaaagccggccagcgaaaaacagggttggggaatatcccaacctcagtatacaagtaacaagttcaactcttttagaaatccaatcagagaaacttctggtgtctcatatgaaacatccacaacctggaatctctttgtccgattattccctgcccaccacgtatcgttctttcgtccagtgttgcagctgtcggtggataaagtgccaattattgagcaatagccccgccacgcgttgttcctcaatctccctttccactgctgagattccttcgtcgttggcttgccccctggcccctaggaggagcggtccaaacacccgcgccaactcgtggaagttgggactcgccactggatcacggagctccatcccggggtcctgggcgtcggtctccacattcaccaacaaggaaagaagcccaaataccgcacagataaggtcgagctgcatctcaggcgcaagggcgatgagcgcaagacagataagctgcactcgggcggcggtcgttgggcttgcctcagagatacaatctggcacacggagcagatgggatggattgggggtccagtgatagtacatcgccctcaggattcggtagagccggacactcccgaggatcccgtttggaagccccgccagcacggcccttaacgcccaggcgacactcaggacgggcgctgagtcctcacggagctggggcatggcaactacacgcatcgtgagggaaatcttagattcatctttctctgcctctagcacctggctagcaaagtgctcatacaagcgaatggcgactttcagatcgccgggctggacgaagatctcgggagtgttaagacctgcaggaaccgagtcagttcagtcgtgacgtagaagaagcagccaccaaccatatttgtgcagaaacatcagcgttgccacaatgtatgcggggagctgcacgggacagggggctaattccgtcagcataagatagccatgtcctccaagacgggccaaagtctgaatcgatcttccttgcaacgaagtcatcgtactggggcgacgaatattcgccaatgttttcattcgtcgcagtttaggagctggtaccaagggagttgtatcgacatccaaactggatcgcaccttgcgaactctgcccaacaatccaaatccacgacgactcgtggcttgttcgggattgcgctctgatgctataatctagtcagtggcaacccaggcccaaacaaagacaaaacgtacgtgggcttggagtatcattaaatggaatggcaagcgagatcccaaactgagctgccatcttgttgtaggccgcgatagccttgggcgagtcaagtgtgctactccaactaattcgacttgtttggctgttggccgaacttccccccggacgttcgatgaccgattcaattgtgtcgaaatcagtctcggcgataggctccagcgtcgcttcagaagccctggatgattcctcgcggctcgtacctgcactatgcctcgaactcgattttccttgtttaacgtcggtcgccttcccatctgagaacgggtccgaaccctcgtgagtatgctttttggtattgctgctactatcgtcagggtaatacagcatcagtcccggccatccccattcccccaaaggcccctgagttggcatcccgaggtgctgggcaggggtttgggagacagtagcctcggtttgactggactcctgagaatgagtcgtttgagtgctgaccttccgcccctctttcgggttatcgaacctgacagacttgccagctgtggatgattccccggcagcagtatcttgcccaacggggttggaagtcaacggtttggagctcgacctccctttgcgggcaccctcctgtgcagcttcaagctgtgtgtccgtgatggggtcatcttcctgggatagactgctgcgcaagcgagtaaccattctcttcagacgcttggtgccattcttggaccgagtaagttcgcccgtatcttgggtgtgctgaacagtcgactcagtttcggcattgtcaacgggggttgctacagccgagctaggtgccttgttcgcatcgctgggtcctgcttctgctgtcgggtcctcatcgcattgtatctcattcgaggcggcttcgggctgatgcttcaatgggtcttcctcagacgttggacgtcgtcgtggccagacagtacgagatgcagcagggttagatggctcagtcttggaccggaatacagttttgagacgccgcatgattatatttggataatgtatacgagaggaagagatggtgatgaagtagagctagaacaggggcgccgggttgtgacttggacaaggtcctgccctcgaggaaggagctgagatacatgaggaagtcacgttctaccttctatagtcctggaagaacaataattaagataatgcttaagcatcattgacattcaaatcttccgagtctattctgtgccagtgctcgtaaaaaacaaaagagagcaccggttttggaaaccatgtcattacctctgtacattcgtaaagcccaaaattaaaaaaaaataggaatagtcatgacctgggtccatatgctctcgggcatttcatatgttatcttcgtctttcgaggtctcgaagagccacaggacagatcaaaacgccggaaccatgcaaaactgaatatgtatggggaaattattttctcgaactcgatcatgcttcctcattctctccctcgagaagaatgtagtgcaggatatcactcagagtcaaaacgcccttgagcttgaagtgctcatccacgacgacgagacggtgcactcgagatttgcggatagtatcaaagatagtatccagtccatcattcaatgaacatgtgtagatacccgggaaaccctgcgcagaacatcagtatcagaacgatatcactaggaacggaggttcatttaccggcgaacgtttcttcaatgcttccccaaccgtgagactcaagtcatcgtagaaaccacccttgatcaaagtaatgacatcgaccgactcgaatacattatacaccacaccttccgagttcacgatcggtacactggatatgctgcgctcgaccaaaatatggatgacatcaataaccggggtatccatcgaagccgtggcgacgttatcatacgatccaagcaagagctcgcccagcggacgacggagctgctgcgtatcggggacattgacggcaacgaatttcaagatacggtattgcgtgatgacgctgagaacgtggggccgctcggtctggctatcgctggtgacgagggggatacggcgggcgcgcgattccaacatgcgccgacaggcatcgtagagagggcgctcggggtcgatggagacggtctctggcggcgcgacgcctagcgctttttcaacctctgtatattcccgttagctgcggggtgtacctgcagagatggggcgacacgatccaacgcacctcgcaaactgtccaggcggaattgatcgatctgatccagcgccgcggggttttggaaatagtattggatgacattgatatagtcggaagtggtcagaagacctgcgaatttggacgctttggagtcccacaacggagctgaaacgatgcctgtacctcccgatttccgggctcacgatcagcttgagttcaataattttgtagagaaggagggggaatcgcgacaaacataccgttttgaatcagaatgttcagactctccttgacggaaagcgacgtatcgaagatgatgagtcggaagctgagcggcaggacatcgtaggagtttcgggccttaaggaaatcgcgaatggcacgctattttctgcgttagtcaagatctggatattcccaggtgatctaatctggtgactggtgaacccatgccgaaacacgttcacaatgtccgatccccatgtccaacgtcaggtataaagaggggttgtctccccttgaaaaagcaaaaacggacaagacttacaaggccctgtcgctcttcccgatcgatcgctcgctcggaggccattggggggcgtaggtacgaggatgggctgcacgaaaggcgcgtgaccagaggaaggtcccgagtcgagggtcttccgcctttcgatatgtggggggttgagggatcctacgcaacccagattgaaatttattcgagagattaaaggagattaatggaatactttccgattttcttccctattttcagagattatcacattcagttaattatttcctgcgaatgagggggctgcaagtacgcggactatacgggaataccaaatgatccttgttcaacgatgtaagttgtatacgacatggataacctggcgacaactgacacctagttcctcaggcatatccccagattccgtctaagaaaatcttccatctggactaggacgtggggcagccaccgacttccggatatagagcacaatgtccgagaacatttcctcatcagggccaaactcatgctgctcataaccctccagcattgctctgactcgcggagaatcaggatcagtcctaatgaaaatattagcagactgaacagagggtagaacatgacctgacactcacagcccccgaacaagtccatcgttgtcccccactcgaccccaaataataaccgcaggccgagcaatgtccgtaataatctccttgacaggcacattcggtgctatcgagagtatgatcgagtgctcgtccacctcgagccaaccacgcggatcttcaattacctcgatgccggcctcgtccagaatcttcgtgtctacctcggtgtagtccgggtcctgtgcgtagcatacgactttctctttgttgtctctttcttttagccactccataatggtaacgaagagcgcatgctgagacgcagatcgccacccattcctggtatacagactgccatccgcattgaaacattggaaggacatcgcgcccagagcgaaaccgacgaccttgtcaatttcatgattctttgcagaagataacaggattgtcttgagtttttcgcaggctagactctccttccattcctcggccttgtcttggaatatctttgtgaccacttcacggtccaggggaccacgccgcgggatgattttctcggtcttactatcccattcgtgtgtccgatgcatgacactgactgagcaaggctcccaatgcgacaacgggtaatctcttcggttgatctcgttcctgagagatgctcgacaccggtaagaaaggaccagttccttgctggatgatgttagttctcgccataatgtgaggctattagacatgtactcaccacacaaattccaatgccagatcgtcctcccaccattgccgaacctttcccgtctcgacgtcgcactcaacaaccgcgccggttatgtctttgctaagtatcttatcgccttcgactgggtctcgcttgatgtgatcccacatatcttgaatgatctctttggtgaaaaatggcaccccggatgcgtagagtctatcgataattgcctttgcttcctccagggttggcacctccccaggttcaaccaagtaacaatgtgtgagtttgtagtcaagatctaaccgcgagattttttctccatcgacaggctccagattgtttacgtcgctcatgttggcgatctggatagaataggtttgagtatgaacaggaaaaggaaaaggaaaaaaagggaataatttattttggggccgtatgtatctatatacgagcattgctattgcggccggcgcgtaactgcgcattcatcatgcacctacatatcacatgagcggggtacaatcaatggtaatcataatatctactgatagctgagtggagagaaagcggctataggacgaaagaaatgatatgtttcgatactcccaacctgcctaagatatccaaagaggcccctatcccgacctcatggctgtgacaacatccttccggataaaaaccatagcacccctgaactttccgtcagacacgagtttcggatcgagtctatgatcctcgtactcctccatcattttcgtgatgcggggggtcgagtcagggtcaatcctagcgagcattcatgttagctttgggatcaaatctcatagcacatattagaaagtccaattaatcactcacacagtgcccttcgtttgtccaaagcgaagccagatcaccatggcaggtctagcgatatccacgatgatacttttgacaggtatgttgggtgctatggacagcacaatcgaccggtcatcaaccttgagaaagccatccggatcgtcaaccacctggatgccgacaccgttgaggacttccctatcgacaagtgtgtactccggatcctgcacgtagcaagagagctccttctcacccggccgcttctttctcagccagtcctttgcggtaagcagcaacgcgtgctggaaggcagagttgggtctgcctagccgggacaggctaccgcaagcaatcccgacgatgttgttgattttgtcagctctggttgttgacaaaagcacttcaagagtcctgtgggcctcacttgtttcccaggcccgtctctccttctcgaaggtaacacccgcatgcttgctactccatatttcttcctttgtaccgaacggatatacctcatgcgtcagtcgcaggggaatgagctccgaaattggaatgtcaatgccatccggatatctcattatgtccgctatgagccttcctgcatgattgtagtcgatggcaaggtccaagctagatgtgtcagctctcattgaaacaaatctgccagtagctaaatcaagcgtgagttgagtaacttactagatatattcccgttcaacgggatttgcgaaggttgtcgagaagaaatgatgtcccaagttcactgtgccctcgaaaacagcgccggtgaggcccctcacggtgactttgtctcccatggtacgtcggctcttcagctgctccccgagatcttggagcgcctttttggtgaaaattggccggccggcttcgtaccattgattgacaaagtctatcgcctgcttctttgtcatcgtcagctgttgacgagtcgaagtgttcgatgagtctgtgtccggctggggtttccagtgcaaagactctgagcgcactgcagtcatgatgataggagtcgaagtcttgcagaactgagaagctgggttgaatatcaagaatcttctgagggttgtagcttcatattaatacatcttggaggacattgctcaaaaagcctacgctgcgaacatgtagtagaagacagtataccacatcttctaccacattcgcgtgacacgttaacatccactaggcgagcacagtctgtgtccaattgtttcagctacttctgtttcctgtgttggttggacgatagattgtgggatatgacttgaattgaaaatcggtagaagggagaaagcgctctcagacaagaaacagaacagatatagccccatttaagccataaatagagatcatggttcttattgtggcgtagtgttagtacgctatattattttccacaagcgcttaatccgaggacctgcaagaaaatagaagtcagacatgactcaaagttcttaaccatctgaatattccccatggtagcctgacagacaacattttgccctgtaccaggaggattagacaactgggaatctcaggagtcggcgcgtaccacccgtcatgcgcccaggaatatagtatagtacaagagatatagaaggagtcagcggatgcgaatgaagaatgtgggaaagagccatccatcgcttttttatcttatattaatcaaagccatatatattatatacatggccattcactgcaaaggcaacatgaactatctgacaacgtgttgacatgcaagaactattgtactataggcttcggcggactttcaattaatctgttagatgatgtatattaaattttcattgaaagaagttgtttgtgccgagagaaggaattagggcgaagagtgacaatcaatagtaaccagtaaccatctacctatttataggcctgcaggggtatgaatcccgaagtagcaggctagcgacgtacgagaacaagagctgaaggaaggcaaccgtgctgttggtagagcaaagcgccaggaaaccgaatgaaatcatggctatcatatgatatggctctaaagataaatatgagaggcaaaaaacccccaaacccaaccggtaacgccgtcgcacccatgcaaggtatcatcgcaaagcacattttgtccaaattctagaccagccagaacctgatctcttgggaggtaaatacatgagagaactgtaagagacgcgaagctcgacgaatctcaacgagaactgaatatccgtagccgggcctagaggtgcccgtgtaacttgaatcggtagatgcaggtgtggtttgcaccccaatttgaagtcactcggaaaacaaccttgtccacacggatggttgacacgtcgacaatggtgttcagcttgaatgcttgcgcgtagtctgggccgtggaggtcgtattccactttcccgatgcggtagaagttggggccgagaattgggtcatccgagtaagcgctagggggctcaaaggggttgctccgacgcaatagatccattaccagcccgtgaagtgagccaattccagggattaggaatcctccaagtcccgtttcacgggacgaaggggcctgggtgaacggtggcggttgtgacactgtggcatctccgaagactttcaggaagccaacacggccaggtttagcctcgggtgttggtttggctttgattggtattttgtgggggttcactttgaagcgagcccacacctcgattgttcgaggtgccgcctctggttcgagagaagcgcccacgggaatgtgctcaactaccaactcttctgccacgatatcgcggccgagaagtacagatagttgagtcgttccattgcgaggagcactgcaccagcagtcgcctacctcttcccacgtggtaagggcagacatgggggattgtggtgctcgaatggagcgcctggcaacaaacgagctcgcccagaggagtgctcgtaatgatgcgctctgtttgggacccaaagtcggtgaagttttggctgggtcaatcattgcccccaatgccaccgagaggaaatttaccttatagattggcttccgatggaggtttgcatctgtgggcgctgaatcatgaacgttggaaagcgactgttctgatcgaacagaattgatctcattcgacaatgatgacatctgaacgtccaattttgatacctgactccgaaggctatggaaaacttccggtttagatatgtttatgtttgaagaggaatcccaatccagagtaccgtggtccagatattcacgaaactttgcggcgatgaggggcacgaagatgaagctcagaaacaaaagcagatagaacgcagcccgaatccaattttggtagcggccctccattgctgcttcaaatgtctgcgtccagctttttcgttgtgactcgctggggggttcattgcgactctctggctcccgacgactctctggctcccgacgactctctggctcccgacgtcggggtcgcgctgctcctagccatcgacgcaaaacgctttccttggggatgtcgggctcgaaatcttgatatatcgccggttcaaactcggcgtcttcctcatcctcctcgagaacattagccaggccagaaactcttcgaggaggcgccgtgatgttgcgtccatgtttgcttggccgcgttctttgtaggtcatcttcgttaatatcacgttctagattccaagacgcgacagaaacattatcaacggagctgtggcggaatggcgtgctgctgcccgaaggattattaatacgaggagatcccatccgttgaagcggcgatggataaagcggagagtttgacaagtgtcgttgcaatgggggttgagcgtcaggactagagtccgtagagatcgaatgtggaactggaggcgaaggagtcttatcggagtgttcatctactgcattatgcagcgactgctgaagctgggtttggtcgggggttggctcacgctttgactggcgtgcttgaacgccttgtttcttcttcgtagcggctgttcgctttcgagcagtctcaagacgggcatcgactaccccagctatctgatctatccccatgttgggtcggatcgacatgcgctgaggtaatgctgtggtagtagcagcgccataattgaatgatgcttgaactggaacactgggcaaaacaggcccttgcacaaggtcgagtattgactcaaattcgggttcctgatgtggtcgttgaggagttgcgccagcccggcgtgtagcacgtttgggcggcatctgtgttgttaacccctagggttgattccaaagattatactttgttcttgttttgtatctatttgagatatcagctttggactggacaggtaaagctaaagaacccagacaatgggatggccaatgtatcaattgaagccttgcagatactaaatattgattgaaacacaatatccacacattcatgcacaagacataatgcgacacgaactggaaatgatggcacgcgaatggaacatatgcaagtatggtggaccagggccattaccacaactacagagcaagaaaaagaagtgacaacaatctcagacttaccacagaacagattgaaaatgcgctctgacaggccgtgtgcagatgtccgaagcctgtagatcgcgaccccggagagacgcgcagacgcgacggtaacgtgacttgcagctgccagctatcagcatccgagggtgatgccactcaagaggtcgagaagtgttcgctttatttcaatgagagcgacaatttggtctgaattgccagggatccgatggataactcaggaggttgagtgaagtgaggaaaagtagacgagggaaaagggtggaggcctcttgaagatcactgaagaatctcaaatctcgactttttgagctgtaattcacatcgaactctgcatggaattacttgttctttatatttttgttgttctttatagaatacagtctcacttccattgtctttgttgttagatctctttgtcaacccttgcgcctcggactgctacgatcttgacactatttttgtttcatttccttacatccctgtttgaaggactttgttcatgttgtatatagaataactaacgtgatgctgctcctgattcgcccggtcgctactaagacatagattgaatactatacaatggacgcaaaaaggctgagctgaaaagaagatgagacccccgtccccccaagtatgcacccctaggaagagatcttacacgtctagcatgtccaggcagccatagtgccatctttacgtccctccacaaggtagccatctttaagacaaacccgctcaacggttgcagggagtggcccgtcgtcatcaagcccaacacctggaccacagtcccagtgcttgccatcggccttgtcatagaccttgaccacaccctccccggcagcggccacgatccgtttggagtcgaacatcatatcggtgatcggcttgtcataagcgtaagcgtcataaatagatcccatgcgtagatcccaaatctgtagataattagaaacaatgggtaagtaggaaagcaaaaactggagtgcgtacccgaatgctgcgatcaagactacccgtgaccagatgcacgtcgtcaaattgaagacatgtgaccggccccgtgtgtccgacgaggctccggtggacatggccactgcgcaaatcccagagacggaccatgccatctgctgtaccgcatgccagcgcggcgtcaaagcactgtactgcgccaataaagtcggccgaagcatcgggcgtgcgacccgatggtcgccagtcagtgtctcccatcatagatgacgatgcttgggcggccgcccacaaaacatccagagtttggacacagcggcctgtgactagatcccattgtctgagcgtcttgtctgcagaacccgagatgagggtgtcacccttgaaatgaagcgctgtcacctcatcgacgtgtgcctccagcgagaatacattgcagtcttcgaggttagaggtcggcggtgccgggaagttgtgttctgcctttccctcttcttggtcacgctcgtgcttgttgaggcgcccgtcccgagtcgtgggccgagcacggctcaggtcccacagcttgacagaggcatccatagaccccgtagcaacaatgttatcttcgacttgcaagcagcgaaccgaggcattgtgtccctccaagaaaccagagcatcggccgacattcatgtcccaaaccctcacggtatcatctagtgcagcactaaccatagtaccaaacggatagtcgaagtcaactgctgtgaccatgtcggtgtgcgcttctatttccttgatcaaagaccctggggcaaagtgttcatgtagaattggcatcgaccgtttccctaaatcagctgtcagttgtgattcgtgtatcagacagaaggattccatacgattacttcgatgtcgtagacttttcggtgaagatgaggggagcttctcgtaaatcgattctgacatgaacgaagcgtccatcgctggatctccggatgacacaatagaaccatcctggccgtctgaccgcggcgtcgctactggtgtgtcctgtgatacctcttctgggaaatcttccagcttattatcgagatcgatcactgttccattttaatcagttttctccgcataatctcgtttgtctcaaaacatcgacccacgttcttgctccaatcccgcttcgtccatttccaagccggccaatcgatcgagaacaatcgtgcggattttgtgcaagttggcgaccttgttatcgatttcgtggatctctgcgctgcacatgtttttccggattcccatcaactccaatttgcgactcagtgatttccgctggtcctttaacccggccgggccggcattcaagctgccgcctctctcggcgtccttgagaagcttccccttggagctccgccttcggtgtcgcttcttctcgggttcatcgggaacggaggcctggaagccttggaaaagggagtaggagctggtgtcttcaggaatgttggcaagaagatcatccgagaggaacgaaagggcacgggactggatctcggtagttgaaagctttgagcggacaaggtcggtcggtgttgtttgtgttagagagaacaccttgcgctgcgtagccggtcgacgcagctcgcggtggatgtcggacatagcattgtgcaagttggtggcattctgttcgcccggtccgatcaggtgtcctgcggtcgtcgtgacttttcgtccgaaggcttcgaggtgacgagtctgcaattaccgcagatgaaatccaatcagtctgtagcttggtgggaggcgtcggagggtgggaaaaagcctaccgttaagccggtgcccaaaaggccatcgccctcgacgatatctgacagacccgacggtgagtcgtcgcgacgctggttctccatgagacggagagtttcttgggctcaaccgaaacccatgcgatatgagaagaggaaagttggaagcttgcggtaggttgaagtaggagacttggtgtcacgcggatttaccgcgttccccgggtactgccgtatggtacttttacaagccaaaaccagttaggtacttatgtaaatctctatgtgtgcggagtatgcgctgtcactttggacttgccctaattcaagtgacttggaacaatatttggtcaaaatgcaaggatgttcaagtgtgttgattctcgattgtggtatttctgcaactgcctcggtcgcatatggtcaaaagtacccaatgcgatagatcactatacactagagcatcgtaagggttctagtgtttgttcaccgttttttctattcagaaattgttgagccctgcatagaagaatgatgtagagctttctgacacagcatatttcttttccaccccctcttctacaacgtataaataggaagacgagcggagtggacttgaagccggaactcacttcgcggtcccacagactctccatctacacatcaccatatatcaagccatggataccgccattgacctttcggatgctctcaaggcattggaccttgctaatattcgtttccagttgatgtgagctctcaccctttccttcagctgcaagactccccatatctttcccccgcccccgccatatccttcaatacacactatagctcgaaacaccacaattccccagactccaccacagtgagagccgctagctaaaagtacagacacgcagtcgactagaagacacaattaccttccatctgatcgaacgggttcaattcccgctgaacaagaccatctacgtccccggcggcgtcaaaatccccaacagcgagctcagtctgctagactacctgctccgcgaacaagagcgcatacagtcccgagttcgccgctaccaatcgcctgacgagtaccccttcttcccggaagtgcttgaagagccaatcctgcagccgctggtatacccgcgcatcctgcacgagaacgatgtctgcgtcaacgacgtgatcaaggagcgatacatcagcgaggtcctaccagcagtgtgccccaagtttggacgggaggaccgtggcgagacacaggagaactacggctccgcggcgacctgcgacgttgcttgtttgcaggcgctatcgcgccgcattcattttggaaagttcgttgccgagtcaaagttccagaaggatcctgagacttttgtgcgtctgatcaaggccgaggaccgggcggggatcgacgctgctattactaattctgctgttgagctcaaggtccttgagcgtttgggcctcaaggcgaagacttatggcactgaccctgctttgcctgatgagaatggtcccaaaattaacattgatgctgtcgttgctatgtacaaggtgcgaaatgacatttggggttttgcttttaggtgtatattcgctgacttctgtgctactttgataggaatgtgtcatcccattgaccaagattgtcgaggtcgagtacctcatgcagcgactcaagggcacacaatgggaataatgagcacctgaacatttatgagaatgacgtggccgatgcaacactgtcctcgggatatacagaaaacaaaaggcaaagcaaaataagctagaactcaatagattttgtcgtaaacaggacatgaaatgcatcagactacaaagtcttaaccttggctacgacatgtattgcgtaagagccttaaccataggctcaaacttggccgcctcaatcaaaatcaagctgcctttcgtccggatacccaactcctggaacgcacgcttcgagtctgcgtgcccttcatcggactgatgggtataatcaatagagccagcacacagcgcatggcgctctataacctcatcttcggggtggaagaagaatcgctcggcctgctcaccacccttcttctttttcttctggggccgcgactcttgctgatcaagctttgactcgacttcctcgtagttcttcgagaggaccagatagtgtgagaatgtgtagggctccttgtcctcaacagcccaggcaatctcctcctggagcatgttgtacatgggagggacaatctcggacggcatgttgatcagccgctcggtcagaatgagaccgataggagggatcggggtttgggaaaggagctgggaagcggcggagagggacgggttggaggcggctttggtcttgaggtagttgatcaggtccttgacgacgggtttatcctgggagcagatagttagtacaacgaagaggcgaagatcgggaagtaacgaaccttgtgttcctgcaggttgataattgacaaaaccgcgtaggggtctgattcatgtccatcaaccttcactgttgatcccagtgttggctgagagagaatcaaatcggccagcgcggacaggtcgaagatctgagcatcgttgtcgaatagttggcgcaagagattcttcaggccgtggaaatcgataggctgggggtcgaaccattcgaaatctacattgaccatgtccatatcctgcagtcgtcatgattgttagcaatccgacggcacacagtccggggttcaagtctgacctcgtcggagtcggactcctctggcttggtgccgcccatggtgacatcaccaggatctttccgcttgaccatattgtgctaattgaggtatttttgtctgggattggtagaatcggagttcaaaagttgatcttggccccgcgttcggtgctgtcgaactttttccttatcggttgttatcgccagcgtaggtcattgttggctgttttccgtcgatggatggatttcaatgttctatattaggctttatatatcatttagggtcttaagacaacttgaaagaagactttaaaaaagatttgttaatttatagggtgtcattgacaagctgtctgggcgtaatggttgatatacttgcacctaagatataccaatacactaccgaaatccagaatataacagcgtccgaagcttcatagaaatgcccatctatatactgtgtggtaaaatacaaaatccaaatatacctgctttttcaagccgagcccccaagtctagacatcatactcaaccgcctcgacagtcggcactttgtgaagcttaatatcaaagaactgagcgacaagctgcacacaatcccaaataacctggacctcctccttagggacaccaaggcgcctcgtaccacgaatgtgccaatgagtctccttgggcagattctgaatcatgataccaggcagcacaacaagctcagtatcaacatcatccaagatctgacgatctgacaagaacagcccgtaagtaatctccttggacagccaagaaaagtccttatgcgcactgaacaaatccagcgtgccagtagtgttgcgcgcatacagtttctggagccacccagtgccgcgctcgtggttggcctcgtcgcattgccatccctcgcgagtgaaggtgaaatccttgtcctcgtcgcgctcaacctcggtaatggccaggattgactcaatgggcttgcatactccgataataggcacggctttgacaagcgcctcgcgcagtcggcggatcagggcttgtcgggctgctgaggtcgcatattctgcttgctgggtgaggtggaggtagagctggtctgctcgctctgggtctgggccggcggctagtgtggtaatggctagtatgtaccatttatcgctgcccagactggtagttttgaagcggttctctagctcagtgaaaagttggcggtatccgggttggacttccgctgttgttgccgtggagaaactcatggttgttcttggttggtatggtagaagaattgaaacgattttaggcttcagctgcagaaagttgccggctcggattggtaatcgagagaacatgccaaggtggcgtatattgtatgattacagcgtttaagacaacgtcaagttggtgattccatcaatcgtagtacaccccgatggccgaagtgggtcgcggcaaattcaaagcattttgtatgatatcacaccacttctgtttcctttccagggtagtgatatgctcggctttacgagaaaacatcaagatagattgttcctacgttaattgcttctttagttagctcaggctttaccgcctgctcactgtgatctgctccctgatggttacataagcgtattgtcccgccgacctcggtcccgagatgccgcccaagtgccggcgctggctcgggagcacccgcatccttcccgctcggtacccagcgcaacaatagtacacgatctcttcaggtgtcttgctctataggatattgtctagaatttactttcaacgtacactattgaaaacatatattcttgtctcgtagaagcatgaaactaaatacacattggcaaacatataatatgtggtcatcccatatcgcaacagatacaaatcagactatatgctgccacggacttccaattctcatttatcttcctttgtctcgatgacttccttctcttcctttgtctcgatgccttccttggtctcttcctcgtggaaaaggttgaccttggtagacgcgaacttgcgggcggagaccttttgttcgaacaaagcgtccatctcggcataagtacgacccttgggttctggtaggcggaagaacgaccagatgaaggaggcaaggcataatccaccccagaagaagccggcctttcctctccagttccagccatccacattcagcatatacgggatcaccaccccgttgaagatgctgaagcagttgtacagattgcgggcgagaaccacggtcttgatgcgaagccggattgtaggaatttcggacacgagtgaatagcaaacaggcccggccgaggaatcataaatgaaggtgtagaccaagagcatggagccggtcgcccaggaggtagccgacgttgaaggggcaatcgcgataaatccgattacaaagaggatgacgcaaagaacagccagactgtagacatacaaagttcgtcgaccaagataggacatgagaacccaggagaagagagtgccaaagaaaccgattgcgtattgagccaaggacatgttgaatgactgagagacgggcaatccggctcgctggtagaaaacagtcgagtatgccatcagaccggctccgcagagattctgtgctgcccagatcaaacatgagatctcggtccggcggagattggtaccgcggaaacaatcgaagtagctggtaccttcattcagctgtttctcgacctcgttggtatggatgatcatggctacagtctcctccgcattgaagtcggtgtttcctctagacgttaaccttgtaagagatttgacggcctcctgtagtcggcccttccggacgagccaccaggggctctctggagccatcagaacgccaatgaagatcggaacgggccaaatccactggatggcaaatggaatgcggtaagcccattcgtcatttcgagactccagacccttcaagacgcccgaggcaatcaactgccccattacccagcagaggttgacgtaagttgtgaggtaggcacgtagggcgacagggcagacttcggacgcataagtgacagacagggtctggtagactcccagagggatacccattaggatctcaccgaccagcagcgtctcaacattgggggcaaagaatagaatgaagatgaaggccattgtggcaatgagagatcccaacatggtcttgcggtacccaaatcgttcggagacgataccgttggcaaacaatcccaggatctgaccacaattcatagcattggataatcctgcttgccatgctgccgagagcccttgggagccatctgaaagtgtgtgtccatatttttggttgaaggcggggaaaccgtagaacgatcccatgagcacgacgtcgtaaccctccatcacaattgctgtcgagatcagaacagaccatccaattgccttcgggtacagcttcaaagcctgccacagtgacatgcggtgttctttgtcggtggcgatctgggcctcctggaccaatgtaccaggatcgacgtccattggcgacttgtcgtcgggtgtctcgacatgctgggcagccgatttgaaatccatctcgttgattcagaggggcgaggtgttgaaaaaacgaggaaggtgatattggttcccacgagggtggatgaattctgagcgactaagcgtgcaccaactctatatatatcatcttccagaaatgatatttctaaaatatgaagtacatcggaacttccgtcggcgttaattttgctttttccaaaagggggtacgagttttctccccggatctcggtgtgatcataggcttcccgggccgaagaacggccgttcgtattgcagtggcttgtgactgaggaatgttcgaaaagccgactgatcatgttgtccctctgtaaagccagggtaatgagaggaagcttttcacatcgtatgaaaccagcagcaacaagcaatccgatgcggcttcaataacgaacgaaaacagagaatcggtaaaatttcctgtaaacagactccgttgccctaaggctgagacacggggtaatttgctcttcccagtggcttaggcggggaagcgacggggtaaaaaatctggttggccatcccacattgcagaaactggggaaatgtgcaagtcaaggaccggcccttctacggagctgcaccccgacctagcaaggttcgactaatgcggtcttgataatcctggtaaacacatcttgcaacttgaacatgcgaaccgtgcgggccgtgcattcgatctggattggccgccaatttggtaataattggaaagaaatatgacagtgacacgggagggagtttgccacggaactctgttggtcaagtgacccgacattaccccgtccacttcattaattgcggggtccccagaaactcggctgaccccgtggtttcccggctccggagtcagaggcccaacccccgaagcgacatggaagacagactcaatgtataacaaagcaaggtacgaatgatccgagttcgacgaactgcatatttttctaagtttctccacagccaactttgaacggaccttactgtacaggaagaagtcaagagcaaaaaatatattaataccatgacgacgccttgacagtgcacaccgacttggcatggaatcggaatcgaacaggatttgttggcccacccgctgccgtcaccgacgagatcggaaacagagcactcatactcgcttcgatcactgggatgaatactgctctcgaagaaatagttccatagctgctgtcaactgctgcgggttcaacaaaggccgctcgaaaaacaaatgttccacgcagctaccagttttgagcagtcggtgaaactcgcagagccatggtctcatcattttgtggccttcgctgactccacgaccctgtaaaggtgctggacattatatttgcgtaacgggcgggcagatatcacatgaacgctgttcaagctcgctaaagtcttccacgcgcatggttgatgagtggggttgcttggcgctcgttcggctcgcgtaagttcgaacgggtggcactcggattaccttctaggtacggagtcctccgtagtgagctagtcacctgcgagagtggaacttttcgcttctatgatgatctgtgtgtgcatcttcaataggcagctatcccgtgactataggttcaatattcggagcgggtaaagacctggggaaattccgcgggcggataatcggagtttactggggaaaggcattgtagggctctcgggctaatcatctcggaacgggctatcatcggtgttactgcggagtagatcttacaattgggagattgcccatcagaaggcccttataaatccgctcgctcacttgcagattgaacatttcaagagaattttctattgatcttttcctctcgttttgtttgcaatctcaaaatgggctcaatcgataattctatagacgcgaacgccgtcgctggacgacggaccgctaaggcttggtggaaagagtcctcggtgtaccaaatttacccagcttctttcaaggatagtaatggcgacggcgtgggtgatattcccggaatcacctccaagttggactacatccacaaactcggcgtggatattgtctggcttagtcccgtatttaaatcaccccaggtcgacatgggttacgatatttcggactactacagtattcacgcgccatacggcactgtcgaggatgtcgacgatttgatcctaaagcttcatgagcggaaaatgaaacttgtgatggacctcgtcgtcaaccacacatccgaccaggtttgtcccacttcctccctaccatgtgaatacacggataaggaaactaacatacacatttttagcacgaatggttccgcgaggcccgttcctcggtagacagtccttaccgcgattggtatatctggaagaaaccagtgtttggcgccgatggcaagcgtcagccgccaaacaactgggtgtcctactttggaggtaaattctcacacaatgcctcagtgtcttatcaagtaactgacatcgatataggcagcgcctgggagttcgatgaagcgtctggagagtactatctccacctttttgccacagaacaacccgacctgaattgggagaatcccaaagtccgagacgctgtacacaagattattcggttctggttggacaaaggtgtagacggattccgaatggatgtcatcaacttcatcagcaaggacccgttgttgccaaatgcgccgatcagcaacccagattctgagtggcaaagtggtgcacagtactatgcctgcggtccaaagctgcatgaatatctgcgggacattggaagcattctgaaagaatatgacgcattttccgtcggcgaaatgcctgaagtcaacgacgtgaaggaaatcctgaacgccgtaggatacgaccgtggtgaactgaacatgatattccacttcgaaatgtgagtgatctggcttatttggctcaaacacattggctaaccagctcgaagcgtttcactggaccacggaccaggaggtaagtttaccagcggtaattgggaaatgcaagatctcaaagccatcgtgtcaaagtggcaaacattcatgcaccaaaacaatggatggaacgcattgtatctcgagaatcacgaccagccgcggacagtttcccggttcgcgtctgacaaacttgaagaccggactctgtccgcgaagatgctggccactttcttgggcttccagagcggtactgttttcatttaccagggccaggagctcggcatgcctaatgtgccaaatggatgggcgattgagaagtaccaggatatcgaaacactgaaccattggcaagagtaagcatgtccgtctattccaaacacggtgcgaccactaacggatctttacagaattgtatccacgaagccggaagataatgatctgcactccactagtcttgccgaatatcggaagaaatcgagagataatggccggactcccatgcaatgggacgcctctacttacgccggcttctccgatgccaagccttggatctccgtgcacgatgattatccagtctggaatgcgtcgatccaggtggatgatcagcagagtgtatatcactactggtcgaatgttctgcgcttgagaaaggaattccccgatgttctagtatacggatcgttcgagctcatttcccctgagaaccctgacgtgtttgcctacactcgcacctccgagaccggcagccttgcgcttgcagtgatcaacttccgggctagcgagatatcgtggaccattccggaacaggtcaagaaactatggtcctccgggtcgattgctctgtccaactatccccagaacaaacgatctgtggtggatagtgacattgcccttgcacctttcgaggcatttttgtggttggcttaatatgttgtggctgggcaaaccccgaccatgccgtgaaatacatagttctttggggcttttcgtttcatgtgatcatcatacgttttcccgtaaattccctaccgtgtcattcgagcaattgcgtaaaactgtgggcctttttgagcactccaattggctagaaactccgtctaatagtcaagaagcggcccaaaaccagccccgaagaaggcccgtacctatcaagtgcatctccacctgaccagacctgacctgactgaccatcgcaccagacccgcgtggatttgcggggttatggctacatccaacggtggtcggtaaaaattgcccagtccttttcggtttagagagacaccccgcaaataaatatgaaagccgatgaacataactccgtaataagcgtacatttgcgcactgatcgggctgatttcggcaacaatgagtgcctctattcgacccacgcaacagcgcaccccggcctgcgacaattgtcgccgacgcaaggtccgatgtaatcgcgagcaaccttgtggaaaatgtcaggaggtgtttctcaattgccagtacacctccgtcccccgacggaaaggacccaaaggccccacggctcctgtgttaagctcgctgtcttcatcaagcaaccattcatctccacacacatcaagtgtctcgttcgcggcaagtgacgcaggacacgcagatgctgtcggtcctccctctgagtcaaatcttgaggaccaatggacgtttttaccaacgacagaatgcccagacacacgcttcgtgggcctcctcaagagtccgacatttcctactgcagcatgccagaggatatcccccgtcttgttgcaggctcatgtcgacatctttctcaaacatctctacccgatcatgccagtattcgatgccgacacagtgacagttgaatgcatgagccctgaagccctgtcaccgagacgatatgctttcatcgttgcgctgtgtgcggcgactcatctgcagctgaagcttgacatatcggagggtggcactatcgaagaactttcattgtctggccaaagcctaatcgagcaagccatacaagcgctacaagaattcgacccccttgacgaaccgcacaccgatacgctgcttgccttcttttttttgttctcggcgtacggcaacctggacaaacataaccatgcctggcattacttgagccaaagtatctcatttgcccacctcttgaacctgcaccaagaaccaagctacctagcccaagatcctgaaacggccgagttgaggagaaggatttactggctactcttcattaccgagaggtatgctttgcccctatactatatcctatcgcgcatacgtacttgctaactttgtacgacagagcgtatgccttacagcgtaacatgccaatcacactacgaggacgcatccagaagccgaccgtcttcacgtccaattcccctgcactggcttatggattcgtgaatttgatttcagtcttcgaaaagatcccatctagcttttacgactggaatgcgagtgccgcgggctctctcggtgactctgcgatgataaatcctatatatcaatcggttgccctttccacccctttgctggctgaatacaacgaaacccagaaagtcgatctaatcgtcacgcggcagtggctgcaaacacgtttatggaaggtagtaagcgatcaagtcgactcaacctgccatcagggagctgtcgtgccgttagatctcccaataacggcagggaagtccgtaatggctctgatgtcgactgttgcacaaaagtcagctgatgcgcatgggataggcatcgtaagtaattgtctcagcggaaatcggccctctgcttatcggtattgtaggaacaaaagctctacgacattggagagactgtgtcattgctcgcacatgtgttacttcccaggaaaaacgacggcgttggagagctattcgcgcacgcccaaaccgttttatgcggcatcatcgacctcctgtcgaatattcgcggaggacagtcgtatctattttcttcgcttcttcagcagtcccacgccatacttggcctcgaggccctgccgccgcacttagcgttcccttcctactggaatcccactctagctgataatgatggttccttgcccggaccagatgattgtatgtcactacaacgttacaaaacttttaaagacaattgcttcgacccgaaattgtcgacatgaaataggagtcgacaagcggaatcggtgagccattgactcttgcaatgcaaagttgcatatggatattcccctttgcccatccacgctacaaccaggaagctacaaccaggaatctggagaatgctttcccacgaaggttggctcggatttccaattgttaggccacaatttgccaatcggaatctcgagtctagtccgtggcattagttggctgagcgtgatccccaatacctaggtattcaagagggactaggacagaccacagagcagacgctgaagtggcgaagtgaccagtccgaggatgaggggggtttgagacggatgttgtaatatatgaattgtacgatatgatgaatatatgtagcaaccgaaagaggagtcctttcgtgtatatatatctctcttgtcaagacagatttccgtctttaagtacagaatgcaatcaacctaccacatgagaccgaaacattgaatgtttgttctaggacttaatagccagcgctagaaactaagaacgatcatcgaccatttaatgcaaaacggcctaggctatccgaacgaattgtctatgacgcttaattacattatttggctagtgaagcaccggctcagctccatataagctgtacatcaagaagcgcataatatcaaaacaatgcctctgatcattcctacaaccttgtgccttcctgcatgctgatgatcacgtggtgtgactggtttcattgcaaaggtgccccttgctacccatgttccccgaccaagaatgtcagattagagatgtcttcattaccacgtccgataagttggccccctgttggagatgttagaacggtactccacactcccttgccctattgccataatgttgcctgacgtttcaacaataacaataggaagacaaccaacccaacccactgagctcagtcgatgggtactcagacaatatcgcacccaacgtgggctattccagcgtgagggacgttcaaggccaactgatctcaggggggattactggaattgtggagctccttgacgatgggactgcactcaaggcaccatatccaggttctgagatcgaaaacaatatcatagatatcgccaaagaagccagtatctatcgtcgcattggaccgcataagaggcttgttcggatgctaggtcattccagggaaggtcttgtgcttgaatatatgaaaaacggtgatctcaagacatatggctcacgactcggtatcgacgagcctcaaattgaaatgggcgtaccaagtcgcagaggctgtcgatctcttgcatagaaacggaactatccattgcaatatcaaaccacgaaatcttctgttagatacagccttcgacatcaagattattgacttctctggttcttcactagatggttcgaagccagcctctggtgaaggaacccgattttttcttccacgacattggagagagcaaccgacggtggcgacagatcttttcgcactagggtcgactctctatgagattactcaaggcaccagcccgtatgaggagcttcctagtaatgaggttgaaagattttttactcaaaaagagttccccgatatatctggtatagtatgtggacaaatcatcaaacaatgttggctatctcagattgattcagcagcggatgtgaaaactgccgtctgggatattatctctcgcacatccaaggttgactgtatccctcacctcgatggtttggacactgctcaggatatgttgattggcttggtttatccttagagttggggtagtcccaccgttctgtcttgtcttggtatacccgcaagttgtcaggcctagccatcctcgaccatgtacccacctccttgcaccgctacttacatcgctccttccagcaggttaatttttacgatattgtatttcaacatagcgagaaagtatgagaacagtatggggtagttccttacgatttttgtgccgaaagagtgggtaaagaaattgagcgaagggagccacgaagctctctgaatagccccttgaatggaaaaggactcagcaacagaggcccgaggtcgcacttggggcaaagagaggtctgtcgacctgcatgaggtgtaccaaactgcatgaagatagtcaaagttccgaagcatgcctgcatgccacagacgcaataataaaaaccttgttcaatctcaatgccatgcgaatccgagagctggccgagttgacagagctggaattagccgtcggagtataatttcagcactggttcttgtaaatgacagaaaatctgcacgtggaaaattgtcggcgaacggaagccgtgacgaatgagaagatgatgcagaagcatttaggagctgtcgtacgtcatggggtcttggtataccgagattttctcaacagtcattcgcagttggcaaaactttgtttcttattgtgaagagactccgaatcccggagtctgacaagcgggctccggggctgttcctgatttgtttcgggccttctccgggcagtttggtttgcggggaacggaccagggtggtttgcggggaccccacgcggctgattttgtgacgaacgaaaaccacgcttgcctggattggtacgtaggcggcttccattggtcattctcgaaggattggtttccactgcgtaacgaactatacatagatagcggatttttatggaattactcggaatcaagtacaacgtacgatggacaattcggtgtggtactctatgccgagaaaaccccgtcgaggacctgacgacgagtgaaatcgacgagataacccactttgacatcccaaatggtcgaaaaagcggagcttgggtgtacttttgatttgaaccgagccccctggaggacccatatctcatttgcaacataggagaatgaatgggttggattactggtaggagctatactaatcatattactcccttgctggaaggggctcttcgtctctgtgttagtaagagtcccattgttatgccagataagacgcggcatactacactagtactatggggtaattaatttaacgaacttggcattcgcgtaatggaatggctctcaaaccctcaaccgtcaatccctacactaagtatgcggtaggccccctccatggcatcatcaacaagactgaataataccggtcaaccgtcatatgccgcacgaacacctctcggagcttccggcataagctgatcccccccccttaatctaaactttcatctaatccaaacccgatttaattgttggttagatcaggcagccctattttaaaaaataataataaattccgtcttaatatgtaaaaataccaaaataaataacacaccaactatgcacgagaattcacgagtggaggcgggtgaatccttcaggtatataaaaaccgttgtataaagactgctttgcccccttgcttggatagaataacaatcaattcagccagcatccattccttcactatgattactctcaaatcttttctactccctgctatcgggctgcaaaccctagctggggcgtttgttctaccccgagaaacggattctacccccaatacacactgtggctcggatttctgtacctggtggcacgacacggccgagataaacacagccactgctgtcgaagcaggcaatgtccggcaatctcaccaatatctcgttcaggttgccgctgctgggtcgaacacctcatacgattccttcgtctacgaaagcattcctcgcaatggcaacggaaaaatccagacccccggagataccagcgacacattcagcggcgacgatggaatttcaattgagattgatgctggcatcaatatggcgtggtcccagtttgaatatagtgaggatgtcgatgtcaccatttcccgcagagacggtcaggatgttggcatggaccttatcattcggccgagtaccattgcgtatgaactcagttacgcggacaatgcagtgatcatccgtgtccctgctgatgaaaacggacgcaagttttccgtggagttcggcaacgacctttacaccttccggtctgatggagaagcttataccaccgacggatcaggggaagtcgttgggattgaacccatcaacgctctgctcatcttcgccagcccattcctctcaagtgatcttatcccagccagcgatggtgccgacaccgtggtgatgacacctggtgcattcaccgcaaatgacattggctcggcatctattgtctacttcccgcccggcgtgtactatatcgactcggaccctctgggtgaagctcacatcaagctcgatcctaacacctactgggtgtaccttgcccctggagcgtatgtgaaaggaggaatcgaatacaccactacagcccaggacttttacgccacaggccacggtgttttgtctggggaaatctacgtctaccaagcaaacgtggaccaaggctacacagcagtcaaagatgacgtgactagtcttcgaatgtggtggcaccggagcgtcacaagcggccaaatctggcactgtgtcggaccgactctgacttcgcccccgttcaacaccatggatttgatggatggaagttccgaccgagacgacatctcggttgatatctacgattacaagcaggtcggggccttcttcatgcagactgatggccctcagatgtacaccaatggcagtgtgcacgatgtcttctaccatgtgaacgatgacgctatcaagacgtattattctggagtcactgtatcccggctcacagtgtggaaggccttcaacgatccgatcatccagatgggctggacacctcgcgaagtttccggcgttaccatcgatacactcaatatcatccactcacgctatcgcaagagcgagaacggtgttccttcggccattattggtgcttcgccaaactacgacggcagcgacaatgttgatagctccaagtcaatcagcatgagcatttccaacgtctactgcgagggtccttgccctggccttttccgtcttactcctctgcagaactataagaacttcagtgtaaagggagtatccttcccagatggactgatcggtggcagtgtccccgtcggagacaccatcattgcttctacaagtgataccacttacgatggatcgactagtctctccatggagctggacatttcgggatggaccgtccaagggcaagcagtgactggagacaatgcagactctttgggtcaattcaacatcaatagtgcctactctggacagtggtcaatttcttcttgattggtataagctatgcttgacccccttaagagtttgatacgctcatactcttctcaaccctcggtcactcatttgtatatatctttttctttttcttcctcagtttgttgatattttcacttattataaatccaaattattattccttgtcagcctcaattcaagatactcactctttactccatccttctgctcgaaccagatcatttccttgagcatttcctccaactgcagacccaaccttgtgacttgagcatcttctattacaaactccgcttttacgatgccatcactgccatcgagccaatcagtaagatgagcatcgaattttcggtcatcggacacatgctcgaatttcaaggtaaaccccattgagcgatctgtagcatcgatgaagagcgcatcatctctgatttggaccaataagttatgatacccaggattccagtagttgccagcgtaagcactgagaggcattgtcggtggctgcggagtatgcctttttggtctttgttcattcacttggcccttctggatatcttgactttttttcacttgggttttcttttcctgctttttcttctccttctttccctggttcttactcattggatttgcatctttcacctcggcctggggttttggaccgcgaattttaacaggtcttgtggctttgcttttgctgtcatgaggtctttcgtccatgactccaaggagattgtcaattagctttcggacaagggtcgccgcaacgccatttgccccatctgagtttcccatgatcacagcaccgaatgagaaatcagggagaaagaagaagcgacttccgaatccagagaataccccattatggccgacgaccatatgtcccctgtaaaagtagatatccagaccagcagcatatgctaccggtgaggtgtgccgcttccgtcttcctgggtttggattcacaaaagttcgcaggcgagtgagtccttcataaacatttttattgatagggtcttcgcgattcataaaagccttgacaaatttgatgaagtcgttcacgctcgaaatgacagaccctgcgccttggccttctgggcagtccggattttctaacccacgatatgttgagtcggctcttttccatgtgtagccagttgccatgcgggattcgaatccttttgatcgtgcgctgctgggttgaagagtagttgatgccatgtccagaggcttgaaaaatcgctcttcgaggaatgtaccaaaattctgtccgctcttgacttccacaagatgggttgccactgtatacatcatgttgcagtaaatatactttgatcgaatgggagcagcgacagggagattcctgaggtttctcgtaatggatcgagcattgtctggcttcgccgctcgcacactcatataagaatcgttatggctggcgcaatatcattagtcttgaactcaaccatgaaatttgaaaaaactagttcacctaggcattccacttctatgacttaagatgtcttccacgctgactccttctgtgtatccttttccagacataacaaagtcctcggggagaagagtcgacattacagcatcgtactgaatatccgggaacatgtcattatcggcgactagcaatcccaccgccgcagcagtgagtgatttagcagacgatgcaatgtcaaacagcgtatctgctgtgcaaggtatttctggatccaggctcgcatgtccatatcccgcagaggcaatttgatcattgtgtatgattgcaatcgccagccccgggacatgctgctgatctatcaactctgtcacatgtgacgcaaaccctgccgagtgcaaaagatccatattgctgatttgacgaattaccggtgtgcgttactgaatgccactatagaggcctgttcatgtaggttccagccagtttctttgcgggaaaatacctcagttcaaaccttgaaatgacagatgccacctggcatgagaatgggggccggattataacacgcttggtcagctgcaacgcttagtgtgcatgccagtgccagatagctctcaacgttgggcccttcggatcgcctaaccggggcggtggggcttcaatccgactgctgcctgtttgaccatttaatagaaatatcacaggcacttctaagttgtaggacttcatacaatttctgtatcccatgcctaacaagaagactatattctaacgaaagatagatactcatctactattaccataattttagcccttactggagcaagagatgccaaattacctctcgtctgtctgcatgctgtcatatagcgccttgaacagtgatcctggccgttcaagcagctcacgcggtgggcctcaacgatacgccctttgtttggcaccacgaagcgatcaaggtccagcgttgtgtgtagcttgtgaacaacaacaatgacagtgcacgcctcaaattctttctgcagaacctcgtgtatcaaagtttccgtatccgcctcaacactgccaccaacctcatctataatgaggacgctgcttggattgattactgctcgaacaaggcagaacagctgcctctgtccatgcgacaaggtcccttcgttcatatcctcatccagcccgccgcgagactcgcaaaagtcccataggcgcacagactgaagtgcctgaactaagcgctcgtcagtagagaccctgagaggatcaaggttctcgcggacggtgccttgtaggaagaacggatcttggggaagggagttgaagcgagcacgaacggcctggcgagtgatggtgctgatgtcgatgtcgtcaacgcaaatcgatcctaattgaagctccagcatgcgcaggagagttgataccagggaagatttgccgctacctgtgcgaccgcagatggctacattttcaccaggtgttatggaaaggttgatgttcttgagtactgggtccgtggaagtgtcataggatacagtgaaaccgttgaatacaatggcacccttttgcgggccatttgtcgctgacatgtcctgtctcattgggcaggttctcgtcttttgtgtcgagaatataggtacggacacgactgatagccccaagagccatttcaatctgcgtccactcagtaacgagcgtctgtagcgaggtactgaatgtcacgatttgatacagggctacgccgagatagccagttgagccactgccgctgatatttgtcaccaaggcaacgagaataatggcgattccagcgataaatagatccagtaccattgtcagccatcgctggacacaccacagcagatattatggcttttatgacacgttgggggagtcgtggacggattcaacgtagtggcttgtccagccaaaggcccgtccagaggatataccacccaaatttccaagaaccgggagaagagaggcgccttggcttcaatatcgagtattcgcagctgtctggatgtgcgcagatatagcagctggatggccacgatgactacaatgcacagtgtaattgcgatggcgacgtagccagaggcgatgaataagaataagatgaccgccgacatgatgactatcatcgaaatacgatctttgaaaaatcgaaagactttccaactagaataagtcaataggtacaaagctatctgcactggatcataataactaacgaaaacaacttattcacacaaaggtaggttgtagcaagctacaacgttcttctcaaggtataaagtggggcggaaattaagcggaactctaaagtcaagatcaaccaccttcgaatgtcatcgagcaccaatgccttgattgcaacgctttgcttaaattatcagaaccctagagaaggcccaagagtacctgcaatcaatgatgaacaaggatcttttgtgccaaactgggctacgccccactatgatctcagtgactccagcatgacatcacaaccagcataccaagtataagaccgagctcttccaatggtaaaaaaaaaaatccatcaaactcctcttctattcaaacgaactacttctttacgatacttctcaacctctcaatccctaaatccactttatatctacacaaaatgtcgaactcaggtcaatccaacgtcggaaaccgcagcatctacgaggcaggcgaccagcgcaacgtccctgtatccgagctccaagagcgggcccgctatgccgagggtatgcccaatagccacaagcacctcgattctaaggacggccgctccattgccaacaagcttgcctctcaggagaacaagcctgactccacacaccaccacaatagcgagtacgacgctgaggccgagttgagcaagcaaaatcctaccaagcctgtaagttacatacaacttttgctcacatgaaacccttgatcaagatgcatttgctaacgcttagcttcggtacaggctaccctccacggcaatgctccgtccaagggtgctaagattgatgctgagctccaggctgatgatgagcagcgtctgcgggagaagggcattaagcactaaattcgataatgctgtttttttatgttacaaataccccctcatgtcttctgattggaatttgaatattcatcagcgggggatgggagggttcatggtggaacatgatgtacaataataatgatatctggtctaacgttatctcaaatgagtaacgggccattgaatgtatacctacattgatgacaagacagacgggcgttgaagatttgtagcttgtatacagtatcttgtagattttgaagcaattgaagcacgtgtctatgtggttgtctgggtgttcgcaactctgacccgtcgctggttggatgaccaagcataatttaacgctatcgatcggaatgcacccgaggtctgcgggtcaaattcttcatgccacttccacctgccaaagacataggaagtagcgtcatatatcatttacactttcgtacgtggaagggagaaccggtgtaatattttacatgaagagggaaaatgtggtccaaatccaaatataccattgtaaacgtatgaataaatagaacatatgtcgtgagatcgctttcgaaacacaattatacgatatgtacgagacagatgtcaaggcgaagctattgtacatcatgaagtatgacagcatatacaaagccaaacaggcaccaaatacctgcaacccttccaatagggtgactgacttattatttagccaaaatagaatggcttggatgatcgaagagccccactgccaactaagacagggcttatccacacagataccgaggccatagcaggcgtatatccggagtgcagttggatataagccaaacatcggaatcctgttcggcgagtggagtggaggggaggagaggggaggggaagctgactggtcgagaagcgagccaaggcacaaaatatgccagtgagacctgagatcagccatccagagtaaacttggggtcatcgtcatgcggctcggcaaagacatgaccccagtattcctcgactctcttgcataggtccactttgttctcccacgttttgaacgcagtttcgagattgcagctcacccatttgatctcctcccagtaagccttttcgacatcgtatccaaatcgcttgatggtctctgggggtgccaaccaagcgcgtccatctgagccgtccttctttaaggtaggagttgtttcccatcccatgccgaagatccggtcaccggggttgaacttgggatagtttgcgtggatgaagaagacgtgcggtgcgggggcaaccgactcgtcttttacacgccacttgtcctgctggatcaaggcaaaatcctcgcgcggatctgactgtgccatagccgacccggacagcccgtccgcgttcgcgtgtccgacagcctgcacacgttcactgacagtatagaacggtgcgcctacggctgaggcagcttggataaaggtttccttatctccctcgccaggtgccccttgactcaacaagcggaaataatgcgaggggccgtaaaagttataatacgctgccagcaagagcgctagagagtgagttttcttagatactaagaaaaccccggtttctgacgactgtctggcagccatggacggtgcctgttggcgtgaaattttgtagtacaagggagatgcggaggaagcccagaagtcgggccatgtgacaagaccattggttttgaatggctccgagtcaagcaaatcctcgggtttaccaagagggaagcagtcggcatccatccagactatttcttcaaaggacgagaaaagaaccgcgaagatcttgagttgatagtgttcaatgatgtttttacccaccacgtccgccagcaccaagcaccgcgcatcgagtttaggaagcacctcgttgcagatttctttctcgtgttcagtggcgtccttcatgtagagttcaactggcaacgttgaccccgcgcgacggagcatgcgcaatgatgagacaaacaccgggaggtatgtagagccagctgtcgataccagtcctcgcttgcctggggtatgaatcggtttcaactccttgtctgactgcttgatatcctcgatgaaggccgcatgggcttcctccatcttgcgtacatcttcatcgctcaggcccgtcagatcgggtcgcggcacgtcttttgtggggtcaaagtgctgggcttcgacatcgcctcgcttttccggggaagggcaactcggcttgtggcgttcaattatgggtcgaagaactttccagaagtccttctggcgttccgtgagtggaacctcgaatgctgtgtttgggactagggggacgttggaggacgcggtgattggggatcggtaaaagtagacggtgcacactagaatcagagcgagcatcgctagtacgagcgccttcgctctcccaggtcgcaaagcacccattattgctagatagttcggataactgcgcttggattcaggggttgaaggagcggcgcacgggcacgccgatcgacttttacttatcaagtgaaggaataaaaaggattcatatatgtattgcccgattcacagaatgtgacgaccggaggagttggttgcagagttgtggcgcatccagggagtccgggcggaaaagaagattaggcttggcaaccttagaaggcctcaacggcctacgtaccttacgacgtacatgcacgagttgctggaccagtatgtctacatatattgtcctatataatcaatattggatcctttgaaggaatcaatatcggacatgagacacgagaccgctcgaaatcccccgattgtacccctgaaagccgaggcctgcccaggtgctaactagcattgaggccacatgaaagatcgaatcagaacaaatatcagacactgatatttaaccactcccatattccaatggtatgaatgctttcatgatcatcgtgggaccatttgcctttaaaaggcgtccccaatccacgtgggcaggtcgactaaagcgcggatcagcctccaccggggaagatcgcatatccaccccccaacctttcctccgtcatattattattccttctttttgagtcgaaactcagagagtctacagtttctacttaaatacgtcttccccccaccaaacccccaaacccctattggattcgccgatctttcgggattccatatttccgccccaattacgaatctacggaatctacccgcacaaagtaacttacgccccgtgaacgcccattatttcaatcgcataggtctttcaggagatcttgacggatggactccatccgggcattgcccacgccagctcaagatggcctccgataatgttgatagtcccatgcgagacgccgcgcccaagggaaaatcccgcaagaccgacccgaacgctccgatccgaaaacgccgcaagagaaccgtggtcagcggagcgtccgacgactgctttgcctgctccaagcgaggagcacgatgtgaccggcgccgaccctattgctcccagtgcctcgaccttggccgcgaatgttccggatacaagacgacgttgacatggggtgttggagtcgcgagtcgggggaaactccgcggccagcatcttccggtgatgcaatcggaagcacagtcgtcggggaatgcagcgagatcacaatcgaaggcctcaaggagcggtgacccgtcttcttcacggatgcctgataatgcttcggcgcctccgtccaccggccctgcaatggcatcgtttgaagcaaggacgccgagtgtgaaactagaaggtagtccatccatgatgccagctgccttcgacatgtcttcaaacctagcttggacaatggacatgccagatccacaatcgtggtcgaacacgcttgctggtccgcctgcgatctcggggcttccgtcacccagtcggccgatgattccaagcaatacgagccaaaatatgacctcggagccgccattgctgtatgctcccattcagagcccgacggctaattatggctctctggtttggccgacagcagttcgattttcatctcacgctgctactcccccagcgtcacaagccgatgaggaggatgtcaaatacgatcctaattatcatgtgttttggaacgctgcccattctccgtcactttcacagctccttttggcacgatccgtagggcggaccccacgtattcgttatctcatcagttactacgctgaagttattgcccctatgattgttgcttttgataccccaacaaacccgttccgaactcacgttatacgcttagcaatggagagcgaggctttgcaggaggcgattgcaacgttggctacgagcaacttgcgccagaggcgagagcacaatcatctctccacggaacgaactctgccggcacgtatgtcatcaatggctcaccgcgccctcaccgacgaagatttccaagatcgatatggcatctccatggtcgaagggtacatcagagaagaaaatcatcatcgagggatggccgtcaaggctttaaatgctgatttagccgaccctcgtcgcaggttatcagactccgtactggcaactctgttggtgctctgtcttttccatggctgcgatactggcgttgccggattccgtgcacaatttgctggagtaacaagactacttgcgatccgaatgcgccattcccgtgtcgtaacggatgaactaaaatggttcatccgcatgttctcgtggtttgatacattgacggcaactacaaatgaccgtgatgtgcaactccgcggaacatgtttggaaatcagctccataaccgatggagaatggggtctggagaacctggccggctgcgatggtcgtctgttcaagctgatttctcagctgggacgattgaatcttctcagccaggaccaggagcccaacctatcgcgcccaaacgatgctggtgtccccactgcatcccttcctcctaatatgctgttcccgggatgggacacagttgtgcccaatacaggaacgggctccgtaccggaatacggattttctcttcccacaccgccgcaaagcagtgactcatcccatcgtcctacctctccagaattctggacagagtggtattcgctcaggcagcgactcgaatcctggcgattcgacccacctgctcatgcctctttcccctctccgcccttatctgcatctgcaatggcctggaatgccacgacttatctgacgccacggacttcctcctcagcataccaagtggcacccgagaatctccaggacgtctaccagatctcggagtgttttcgtcatgctgccctgctctactgcgaacgtctagccgagccgacccttccatcgtctcatggccgtattcagcaccttgtccagctcgccatgcattgtattattaccgtgcaatcggacgtatatcttctctggccactgttcattgtcggctcggagtgtgtccaggataatcaccgttcgatcatccgcaatcgctgcaaggatatttccaaggactctggcttcatcaacaacctttcctgtctagagcttctggaacggatatgggctgagcattctgatgaatcttcattcccagtctaccctagcgggttgggtcccccgcctccgctggctggcggcagggcaccatcacaagccttccgttggtcgcgagttatgcaggccaagcggggtgatggtgagtacatggttgcgtaggcggtttgccttctatctcttttaatttttttgcccgagctataagcttccggtttccagctttacagcattctggtgggacgggcccattggatttttctttgttcgaggatcagcgactcgtgtcttcaaatgataccattcattctatattcagcaatattccccaaccagtactatctacattgtacatattggctctttttttttctgggtttgcttcgggaaccagccttccatacatatacctacaaaatcaggataaccattcaaaatatagaccacgtcataattttatcaatgaaatgaacctataagacaagcaatttggacaaaggtccttcgtaatacgttgtatggaataactaatctacgttctacaccaccaaggctcaagggccaaatagggcctggcccaagccactcggagataaccaaccccgagtcatccccagttgatatgcgcaaaagtaaaactgcgcaaaaggacgaccacataacaacccaacgcaggccatctttccctatcacacatctcacggcgctacgacaaaagtaccaacccacaccccaacctagacctataagcgcttagagactacattatagggcacagggcaagggcagccacccaaaccctataagatcagcacgcacaatgaaaacctcgaaagtttaacacaaaagccggatagtatcaataatacacgtactaatgaccgtcgaagatcttcccgaccgctagtattccaaccgggcctagaatactcattacaaacactaaaatgggttcaaggattcgttttgattctcccgcgacaaagccgatgtccgctcgtgcaaggggtggcagattaatatgattctgttgcgaaccgtaccgttcatgtgatattattgatggatcttatccagagcgtgcatgtttaattagatgcctagggggtaaggaggtaggtaggcataggtgcttgtaaatgtaggtgaagggttgttatcattaccgctccctgtacttccggacttggcggacttgatatcaaaagcaaatttaccaatcatcgcacattgaaatcgaggaattcagcagtctgtaatcccccgtacgaagtacagggtacccacacggcatctaggcgtccaccccctatatgtatctaaaacctgatcgtctacggagtagcaaggatgttgagccgttaagccgccacggcttaatacactatgtaaccgtaagccgtactaagcttagatactccatactgtgcgcatcgcacgagaagcacgggatataaattaaaaagagccaattatctcgctcagggggggggggaaccggtgtacaaagatgtgtgtgcgtgtccccgtgcgccagttcaaggttatgttcctacagccgagaaaatatgcgtcccggcttccagcccgttggccccctgcagccttgttagcgggcttgttggtggattttgggctttaaaccttgttccagaaattctatcactcctaggcgagttggcattacgcactaaataaattaaatggtacatggatttgttttctttctttttgtccgtcctcggctgagatcagcttgggtggccaaggaggtgaaaataggggggggcgatatcgagtcagatctgttagacgtcggattatctatacaacatagacagatacgtctactccgtactccgtatatattttgtttttaatatgcctgcatgtgagatctatcctgcagatacgatcaaaaatatgttaggtaggcgatatttcctttttggaaaataagtaaaaataagccatgtgcaaccctagatgatcggcagtgcaggacggggtttggccttctgtttggctggttgattaagacaaggggggaatctcgaagggttgactcattcagaaaaacaaagccctcgaatcagggatggacctgggattcttctgtgtgggcagcaaggacgcgctggaaattccgtctttcattcctttactcggtgcgtgagcgtaaaacctatgttgtatttatggtatttgtggctgagccaagttgcagtggctctgttctctacgttgaacatacagaggcatgtgtcctgtgtcctaaaatagagaatagttgtagatatcgttgcagtattagtgtgtagtttatagttctaggctataactagcactgccagtcatgacgcacaatgtacatctgatagcgttggttgggtcagattagtcccaaaaagtcagactagggcttagagttgattgtgatcacaacgatagcgagtcgcctattgttcatcgccccacgctgaaacaatgaactgtcggcggccaatgtcaaaaattgatacatagcagggtagtgatttagaagtgacttcattttgcttatgttggaggacactacttcattatgcggcttcaattcctaacgtgttgtacacagccgctgcgcatcccacgatttcttacgagtgcttggtaataactatcctatttttattactctgtacgaaaatcttcatcccactcgagctattgacggccagcaagttgcggtctgcaaattctctatttttttctagcccgaaatggcggttgctgcccagcgacgcagcggtaaagcctgtgcatgacccgtgatgtcgcccaagatggcagtgcgaagtggatgtgtgtgtaaaagatatacagatggggctcattggccttttttgccatggcaacgtgttcgtatatgttacatagtacatagtatagagtacggagtacagagtaataatatctaaactgtttggagccttggaggttagtggagtctgaaccactggacgagacgggatgggccgccgtgacacctgggatgccgtcggtccaaccatggaaccgacaattcatacatccatgcctacacctggtacaacataagtacttacatcggtcccggggtgattaccactattagaggatattgcttcatatgctcgagataaggtatcattctcccgtatacagtattctctattttgctgcaactaatgatggcgttcatgcagatgaactgacggggcatggaaaatgtaagcccagttctggaagtcgagcacatggtttgcgctcatccaacccaaccatgacacgccagctgatggaggggtgatctaatcagtttcagcgccagacatatacaaggcagccagtaagatctatcatggaatgacgctatgtcttagtggcaacagtcacgccagtttttttctttacctcagagtgactcagtccaacaagagcgagaaaaaaaaaaacctcgctatgcagctgccttgagactggcaaagttaaagacaccgaggaaaatgcagttgtccgctgcccgatctaactgaggggctatcagccaagcggttagcatagcgtccaatggaagcatcttcatctggactagcttgaggggtagagacatcgagacttcttcatggtactttaggttatggtggattcacgagtgtcgtagaatgtaccagttcctcctagagtagtgatcgtatttccaaggttgccacataaagttgagtcataatatgtgatggctgagctcgagcgcaaggtataaaagagacggattatcacccagaagaaggaatagtagacctaaattagaggaaatgaatagaataccttgaaactcgtgaatttcaatacccgtaagaaagaaacctaacgccacagccacgacgccagctcacacgcgccggctactcgctgattggccagcgcaaatatcgccggcgctgacattgggatccatctgtcttttccctttcatcgggtcgaattttttccctctccactctccccactgaattcaaagccattacaccttctggagcggatctctgctctttgttttcctcaatccccttttatcaataggagatcttgggtcctaggatcccctaaacgcactctctctcttttcctcggattgaccgaagaacgttcaaatgctctctcagcacattcagttccaatcctcctcttttcgatccaaaaccgtaccacggtgacggtcctatcaaaaaaatcctatctggcctgcagtcttaaagtcggcgtcgattattgtttgggtgcacgatatcctgtataatatactcggtgttctttttttttcttgctgatttcatttaattgcctttggattgtttgcattttcggcttgtcgcctcccatttacatttatctgatcgactggtgctccatatgctcgtgcgataatgtatcattactccagtccaccacccgggtggtcaacctacgactacacccaaactcaatcacctcccacctcacctcaatacgcctactacgcctctcagttcgccaacgcctacacttcaccccgcgggacctcgcgacgacacaaccgcaaagccagctactcaaccaccaaagaaacaccatggtattcgtcgggccacccacaaggctactatgaagcaactccagactatggcattccatcgcgaaagcacgatcatgtaagtgcttcttttgcgggaaagcccaaacaccaccgatactcctcgaccggtcaccctacgggggatggcctcggcaacggataccacccgtcgcaatcgcaggctcgtcccatcttcgtagatgtggtcgacgaagcattcgatgtcccgcgcacccacgttcgcgaaccccgtaccggtcgccgtcccccggcctcgaaccccactcgagatggccctggccagcaccgtcgcactacctcgacctcttaccgcaaatcaaatccagctgattctcacttttacttcactcaggctcctaacggcgaggatatcgatgcggccagacgttcccataccaggcgccaatctacatcaactcgcactcccaacaaacccaaaccaccgcctgcttctgccaaaccgccacccaccgccaccgaagatgacgccgaggccgcagggatccctccaggatattcgatcaaaaactgggaccccaccgaggcgccgatcatcttgctcggtagtgtgtttgatgcgaactccctcggcaaatggatctacgactggactgtcttttatcatggcgcatcgacgcccatggccgacgtcgcgggcgacttgtggctattgttgatcaagctggcgggcaaagtaaagagggctgatgaatgtctccctcgcatccatcgcgtggaggcgcaggaagtcgtcgaagacttccttgaaagtggcgagcgcctctggtcccgattcaagaagctcctcaagggctgcgaactttacatgtggaaggccgccaaacgagaaggtggcaaagggcccgtatcaatgggccgcaatgcaggttgcgaatttgtcgaatcgattttcggtcgcgaccgtgagcttgaaagtaccgagaagctcatgaatagtattcgactctggaatatgcggttcgacgccaactgcgaagacattctccgccgaccgtcggctgcatagaatgttttcttcatacgttttattttttttttcactagcgactgccaagggagcgatacccccaaagagacagattttcctaatactgcttttcttatctacatttggagcatttgacacttgttgaatcgcatttggagcgtgttgctttggcttcggctggctttgctcgtcgcatttactgtttgttttttcgacccatgggcagatgttgcccagggtacaacacaaaagatcattgttattgttttgctttgcttttctggtgccggcgccttgatttgacctcgtttctttcataggacggcgcccgttttatccattctacttcattcctggcgtccttgtttaatctttcaattccggccgtcaagttcgttctgtcttgccgttgaagtccgtgtcactctgctttgatgataccatcttgcgatttcttatatacgtgcttttctactcttgtctcttatttcctttgtccttcgcattacagctgttatccagctatttttctgtccttaatgcttgatttgatgttgggtcggaggaaccgggttgtacatagaaccaacacgacccaaacgtccgatagaccaaccctaacgctcgttatacttttctattctatactttccgagatactccgtaacatgtaaaatgaatactatttccacgtagcccaaatccaccaccaaatagcctgtgatgtgatgtgatgtgatagccctagagctacccctcaccccggcgcttcctgtgcaatgcaagtacgtacatcgcacattgtggatcactaccccgccctgtaagaccatcgaaagcgtctagaatcaccccgggggccgccgttggttgctcggcttggatactaaatagctatttgatcattcactggctgtacgccctccaaatcaggtactatatctccaatgacggcagctgatgtcacgtttcatataagtgtaggtcccagcgttggatcagcttgcatttttctcatgcaggtgatcgcagctgctattggcttagatttcgaaatccaaccgctgcatgcacggtggttggcggtacccgagggtgtggcggccctatcacaggtgaggcacgggagtgtgggggttgcgtgcatgacttgtggctttggtcttgggttgcatggtgatcctggatttgaggtgttatttagaatgaacggtggctgttactatttatagttatggtggttgatattgaggtatctggtttagtatgaatgtaggctttgggggatttgatactcttgctgggtatatgtgagcagcagttcttggcttctatactgaattagtcttggcttggacttggcttagacttggctgacttggttaataaatctcccccttggtttggagtcatactgtgcttgtgacacgtggctccgaaggttgaactgtagaaagcagccgagcagctataccatatggaaactcctgggagttgacatgacatggaaagctcatgacagtctgccatggtataaaagcataaacttagcaatacttcatagccaagaccatggaggtggattccaagtccatgtggccatgcaaccttatttgccatatcagacctattttctctcagacttgttcaaaataacttctagaatcaaatttctgcccaggtgtgttgttaactgaggtctggaataatgatgacgcacgtgggacggtcacgggactgccagctgactgatcgttgaaatcatccattccaaggttttctttgtgaagtgatgttgtagtgctcgaaccatcgaattaagatgattaggtgatatattattatttcgagttgatatttttcggagaattgcttgggggtcaacaactaccaagactcatactcgtcttctccgctgtcctgatgcaatctcccaaggacagatgaggatgtgactcttcaagattcccttaactcaaatatctagctcctggcaatttacctgattccaagtatccgaaggatttggcctcagacctataagggtcattcgacttcccgatctgggcacatggctatgctagatgaatatctacgacagttgcgatgcctacagacgaaaagtctgataggctatcaccatgggaatggatccggagtcagattcacatgaggccacctgaagatgacgaaccgcagtggtggtggattgcgtccacgaccatcccgctaattgctgctacaacgggaccactcgccaacgttatgtcaatcgttgcgctcgttatgccatggcgaagcaaaatcctctcggaaaatcaaagtgctgctggaaacttcattcaagaaggatatccagatcctcattggtgagtacgggcgagagggcgttactttggatcggattgtctaacatcacgaatagggccactgttctaaatgccgtttcgcttttctgcggaatcgtgggcaatgcatttttactgttcaatttcacacagattgtacgctatattatagccttgcccgtgacgatcatttcgtggttcctagctgcgggaatcgtgagtaacttctctagttttgtatgtcccagacctaacgctcttttgtagctctgtggaattaccatagccatgcatatatatgctcctccagtaggcgctgatagggtctactcgcaggcgtattggagtgccgtcattgcggcagtcctctattttctcttgggcgtcctcttgatgatcaacatgctaggctatttcctgggtaaatacccgcaacatttctcgctgaccaatgagcaacgaaccttgatcctacaaatgactgcattgatggtttggctattaattggcgcggctatctttcaacgggtgatcgggatctctttcgccgatgcattgttcttctccgatgtcactgttctcaccttggggtatggcaacataatttccaccaatgccgttggtcgaggtcttatttggccatacgcagtcattggaattatcattctggggctggttgtggaaagtacctttaaatatggtcgtgaggttcactacgataatgtgatttggaaacacatcgaaaagaaacggcaatccactttcgaacaatcactcatcaacgagctcgagtctgctaaagataaactctcgcctagcggagttatcacccctccaggtctcacccgccaaaactccaagactcgacgccatcggcatcaccggccaatccgcaacaccatcaacgctatagccacggctcgccgacccaagattctcattatgcgtgaagaaaaggatcggtttgatgctatgcgccgtattcagttcgatactatgcgtttccgtcgctggaacaatttgatcatgagcgtcgttgcattcggaattgtgtggtcctgcggagcagtggtgttctggaaattagaggacattacctactttgaatcactctacttctgcttcacctctctgttgacgatcggctacggtgatatcacaccgcagtcaaatccaggaagacctttctttgtggtatggtctctaatcgccatcccaatcatgaccatgcttatttccgagatgagcgacacagtcgtcgctagcttcaaacgcgccactgaagtagtcgctgattacgtcgtgcttccccaatcccatgtctataagtcatccttgggtcggattcctatcgtttcccagttcttgctggctcgccaagcgaaaaagcaacgaagacgcggtttcccccttgagggggatgatggatccgacactggggaaagagcgaaccccgaggattctagtcaacctaatattgaaagcggtaacttggccgagtctcatccgcaccgatcccttgaagaacttgtccgggatccgaccccactcgagcttgcccagcaacttgccttcgctattcgccgcgcgtcgaaacaagcactggaacgcaagagaaagcgatattcctacgaagaatgggtcgaattcactcggctcattcagttcacagacccgcgagctcggcgaccatcgtcacagagaaaccagccagcaagtgaggaaggcccttctaatagtgaagacgaatatggaattctcaattgggactggattggtgaaaacagtcccatgctggcaaaacagacagagcccgagtgggttctagatcggttgtgtgaaagcctgattcggtacgtgtcgactcaagagagtcgggctgtgggaggtggtgcagatttgtcggaggagccaactctgaggaaggagagggatattgggttggaggagtgattttctgttttattgttgtccacgggtacatattgcttgtattaattcaatgttagcacaggccccagggaacatattcttccaaaagaggaagtgggtcaaggtcacatgttggtgcctggatatttgtgtctgcctggagatcatggccacaccacgcagatagttaagagaaggtgtctacatacacgtaccgactgcacagctatatgctagatgcaccctccatccacacattgacatgtcttccttcatcaggccaagccacagtcatcatcaggcttagtagagtccccacatacgtggcgtggggctgtgtacatccgtccattcaactacactctgtcttacatctgccagcttatatcaacaaacaatatttctcccttcgctaataaaacccccatcaaatatgacagccaacatccctgaaatcctcctactatgcatggacatcgacttcataacagccttcaacgatgcgcttaaaacaacctggccagatcacaacccagaaaaactaaagatcaccccaataaacgagcgcctcaactccctcccagaagcaacaacctttgacctaatcgtctcgccagcaaactcctacggccgcctcgacggagccttcgaccacgccatctcaatgaccttcagcccgcgaaaggactaccacgctctgacacgcgcagcgcaaaaagtgctatatgagaaatggcgcggctttgcgccacccgggtcgtgcacacttgtcgagttcccggatgacctaaagcagaataaatacggctgtggatgggtggctatttgtccgacaatgcgtgagcctggagatgcccgctgggaccgggaggttgtctatgagtgtgtgtggagcttgttgtgtcaggtcgaggggcataatcgctctgcggaggagaaggagaagattgggcggattcttatgacgccgttggctgctgggattgggaaggttagtaaggagcgctgggcggtacagacagtgctcgcgctgagacaatttgttgacgctattgagaggcctgcgaggtggggtaatttggggtgggagcatattgacgaggattgtctggaagttgagaggacttggacgttgtgagttgtggttttgactggccaagattcctatgggatggtgttgggaaatgcgtgtcaataagataactagctttgaagatatcccagagctatatctctcccactgtgcttctgtaagcgagccattccttcggttcggtccattttagctttcaatttgtctctaacattgcagtggagcggatggggttcgagggcgaagaatgcggctgcgtttcgctttcggtagtggtagcattgagagatacacaaaaggttacagttctgttgtgttgtcaagaggtgggattgagtttactacattcctatgtctcagtggccatttcgtactattgtctacataggtatgcatgtctttttgatacttccactttccctggccactatttaacaccaaagtatcacaatatttacccgccaaaaaggaggctctagccattccaacactttgccacagctctacggagtacataatagcccattctttatcaatcattgatcgacccaggcaaaactgccacggagcggggcgaacccacgcttggaatgtggcaaccaggcaagagaatcttggtacgccatgttttgcccgtttggtgaagaagctgtgttgttttcgtggtatgcagtatgcaatccagtgctggaaggatctgatacatttcagagcgcgggtacttgcaggatggggtattggcagcatttcccatgcgaggatcccttcctgtcaggatacgatggctgatttttttcgatcagatagaatgtcgagtcagcggagtttaaagtaaacactagtgtcttctacctaacttggtgtgtgcagatcagaggtttcacagcatacttgggaatttttgccttaagcgcataaagcgcccgtttttttttacttctgtaggaattacattctgtgtggacctcactcacagctcatatttagtgcaggaagcccgctaagatggagaaatacatacacccactggccaagaatcaaatacttgacctcacccccaagttgtacctagaccaacaacacacataagatgacaatccaattcccaatcatgccattcgactatttccaacccagcccagccaagaaatttgtctctctcaccaagcactcccgggtgactggggcaaaagtcaacacggtgtttcacgagctcaagccacttcagccagacgacttgatcggcgaatgggacggatatatccttgccacgggtcacccattcgagcacgagctggacacgctaaattggttcggcaatacattttattccaccgacgacgtggcaccactgatggttgcgcggaacggggaacgggtgccctttgaagattgggggcgtgcatccgtaagtcatttttctttaatttgtgacacatttccaatgctgcatggctatatgcacgtgtggttgtggttctcgaaggaagcttgtatgtattttgactcgggagatcaggtctgacattcttttcttgacagctacgtgaaatcaaatatcatggagttgtctctgcagctttgatttacgacgagcgacccatgatggtctattatcgagctgtgaagcataacatggtggctggatgtattgagagtaaaaagtggcaggggaaagtctacttctatttgacgagataagtagattgttatatttagtatgtagtccacaagtgttggcttgagtagggatattgcgtctattgcttgagcgtgattgtataactatatcagatttatgaagtggttcctcgccacggcagtctgctgttgaagattcaacctttgccaagcagcttggctacttttatttggccatatcagactgcataatgtaatgcagaccacccagatgtatcagtctggttcggatcgtacaccttctctaggagagcttttatattttcgcaatcaccattagcgacagcttttctgaactctgccgataattgattcatcccatccggtatagtcaggtgtcttcaattcactccgacgtttcctatattgcggatttggtaacccatttctcatgtccttgatcatgctctgggcactctgcatgtagtaaccaagccgttaatgggaggggaaggacaagtcaggatttatgggcgtgcagaatattcagggagcattcaagtgaataatgggccgaaggccctgaagagtaagcggcaagagggacttcgaacgaatgataaataaaatcatacaatagtgaggattcgctggtggtcaccgttcttacaccgtcatttaaaccacctatcacctaactagttaaggagcgcaagtttacatcatcgtgagtccaagattggaattcgcgatttttcctttgcatgttttacccaacaactcgcgaagaaatcagagttctatatcatggcgatccattttgtctacaatggactagaaaactttttaaatgtctcaaggggccaaaagctttgcgccgagcaggccggattcgattgattggcattttcagaagtcgagcataacttctccgggaggggatcgctaagaaaatggaccaattactgatagtcatggtggtagttacctaggtaattggatctaaggcggccattgcgaccacatctagatccatggatgtatccatggggttcaacctatccccacatcataattcactctacgcaaaactcatcgctgtccaaccactatcttcgaattgttacaatgaaggctcagacagggctagaagtaacccttctttcctcgtctaatagtctttccaatgttcggccaagtgaccttgagtcgttgatcgatgaagcgattcagacctgatgggacgcgcttgatcatcagagtcaaaggacaagcaaactttctcatctagatcctcccaaccgtcgacttatctccatttgactcagacgatgccatcaggcagtgtcgcgactttctcgtcgatgacaagcgatcaacactgtccattgtctttaagggttcgggactcactgcttcacggaacgacgaggacattactggaaaaggcccataccttcttgtggctacaaggttcatggggcttactgctcaatctacccggctcccattcagtagagaagacttgatgaacgtgcagcccgtataattatgcaatatatatgacacgccagtataaaaggtacctcgatatgagattatttggggcatctaccttttatatgagcatagatacctaattcttacaatttctgtttagtgggaccggaccgcgggacccaaagtcacctggacagtcaaaaactaaggggcaaatcagtcacaaggcacattccgacactagcaagaaatactgtttgaccggatggaaaagagaatcacctctacaatatacacaccgaggaatacatcaatcgctcaatgggcactcattttggcttacggtgagcgatatcatcttggtacaccgctagatatgcctgggattgaccttgtactataatcgcagagccgggattgcgctattatcatcagtcccggtctggagcagacgggtaatataaagaggatgtggttggctgtccttaattcagccctatccgatactacgccagtgctctccactattgcgtgctgactatttatttgttacgactttgagctcccaggcagcagaatacaagggggtcattagttgcaagatttgcaatatcatatcaagttcgccctgaagcagtcggctattctacctgtctacttgtttacgtgcagatcgaaaaaagacagtcggatcacaaacgccgaggaattaacttttccccctcggaaagtcgcctcgtgccgaccacaggaacgcgaaaattctgtcaggctttcacctgcgaacatctatcttttaccctatacgcacgacggagtacactttcatactcgtggccattcagaccctgtcaaaatggagaagacagacgccgcggctacacccgatctcgaagccccagacgtccctgccagagaatccagcctcgcccaacgatggaagcagaacctgacgcccactcacgcagacttggtctgtctgctcctcactttcctcaccggtctatgcgatagcagcgcctacaatgcgtggtcctgcttcctcggaatgcaaaccggtacgagtcatacccgccgctcccccgcaaagggggcgcaaaccccaaaccaacaaaaaaaaaaaaaacaaaaaacaaaaaacatccggaaacacaatagaaactaacaatcgctcctcaaaacaggaaacaccatcttcctcggcctcggcgcctccaatcaaccaactaacaagccatggggctggctcaagtccctcgtctcgatcgcgtccttcttcttcggctcgatgatcttctcgctcgcgatgcgcaccgtcggcgccctccgccgcggaaccctcttcatctcattcctcgtgcagaccctgctcatcatcatcgccgtcgccctaatcgaagccgatatcatcccccacacctcccatgacgccaccctatccggtggcccgctgttcctcgagttgatcccgatcgccctgctggctttccaatccgctggtggaatgacgtgcagtcgtgcgctgggctacaatgagatcccgaccgtggtcttgacgagtgtctactttgatattgcgtccgatccaaagatcaccgataagccgacgacgaacgttaagcgcaaccgtcgtgttgccggcgttgtgtgtctcctggtcggtgctattgtcggcggctggctgagtcgtagcagtggtggtatgcaatctgcgctatggatggctgctggtttgaaattcgttgctgcgattgcgtggttgttctggaaggctgcgccggcgaaatagattcgcacggctgttcagtgagttaccttgttctggtgttgtagaggtcgagtagattacaatttatagttagttgtgcatatatcaatgttaatagtttctgatcctggtgttctcgtgtctttggtattattcactctctctcaacgtccaatgtacttgatgtattatgttcaacaatgtctagacttcttcctggatatgcgggtggctgtattggctgttatcctagtggctacagtggtggatcaattcgatcccggagatgttgatgtcgccctggtaatggcgatgaccttcaatggtgttttgatgcagcttatcaaagattggatgaatatggaggcatcaatcagggctatgtgccgagtgaaggtatattctgactcgatggaatctttagaatgaacactaacaatccatttttgcagtgttgaaacgaggccgagaatatcatgcaatgcaagaagtcatcaacagattcaacgctgagtttctgactcatactgtcttaacagttgtgcatcggttgaggttgatcaaccatcctgtgcatagtagatccgttttaaattccacaactgccattcagcattgttctcagtattttgaatcctgttccatatcgttgcccaatgcgcttctggtttgataatggcaattttttacatatcgtgagattcaaactagtcatgagttataaaggagacaaggtacatatgagccccgctacaggccaaacagtccaccgagtatgatacatagcgacagaaaatcgactcgtagcattagagagatcaagtaagagattagcagaccttcaggccatgaatgaccatactaaaaataataaagggattccctttcttaactcaagtgggcttgtgaatagttaatgttggtgagagaaggttatgtgacgcatgatcaggtacaaaatgcaaacccttccttgacgacggaagatgcgtatgcaatccaatacccgaataaggaattccgtgtcttgaaggttttggaaaccagtcatgcgattactaagtgttctggggattttgccgtggttgcccgccagactcacggctaaatgttttgccggagatatccccagcttcaccaacacccggagccccgcaaatacatgtacatgtacggagcagtatgtacatacatatcggatttgaggccgaggtcgatgaatttccctttgcgtttagtgctcatccccgctttttgacaactgtgaatttcccgcgagcgacgtcaccacctgagcagcctcgtcctactcccgaggtcattgagcagcacttcctaggctgattactccattggcttgggaactttctcactgcacctcttttttctataaacatagagcgatacttacagcggtctcgtacgctctggtttcaatgttagccttctctggatatggcggggaaggtgggggtggggacgggtttagatggggattgtcgccatcttcaggaacagccgttggacagtgggcacagtatagccgagggtaacttctacatcgatgtttttcggaagtgggcgactttggatggggactttctaggtgcaagagcgatggaaaaagcatggctgaagtgctctaccccagctcattccgaagactgttgggcgagaagttctaccacgaattggatctcagcatctctgttcctctgaagctacgtttgacatcatagatcatatgagaagttgaaaactaatgtgacaacataatatccaatcggttgtagatggctatagcaggtggcgaggcatttataacggcaatagacggatttcgatatccacttcaaacttacttggtcttcaactatttcttcaagaatcgtatcgcatatataaaagatagcgttgatctttcgagataagtcacaaaagtatattctcaaatactcttattcaagttcaaaatgactgtcaccacaaacggaaccaccttttcccacatctctatcaagcctttgcaccggactttcggtgccgaggtcagtggtgtggacttttcggctcccttgacggatgaagtcttcaaggagatacatcaagctataacaaaggtatgccccacattgctagcttccattatgcggtcttcgaattgacagtgtggttacaacgcagtatggtgtcctcgtcttccgcaacaccggtctcacagatgaggggcatatcgatttttctaagaaattcggagagttggacgacgtgaagccatatatcagcgctggtcggaaacaccgtctcaaatacgcagagctcttcgatgtcagcaatgttgaggccgatgggaccatccttgaccccacaagcccacgttcccaagcaaacaaggtaaatatctagataatgatcgaaagaaatatctctgcataacagttctgaccatcacgggtacacagggtaatgacctcttccatgtggactcaagctttaaccctcgccgcgccggatactcccttctcctagcacacgagctgccacctagtggcatgggtggccacactgcctttgcagacacgaggacggcattcgacgatctctcgccggagcttaaggagcagctattggccaagaactacattgcttgccactctatgcaccactctcgcaaaaaggccgcccccgaggcctttgctgggatcaacccgctcgattaccctatgggacggcaccaattggtgcagcgccacgaggcatccggtcgtatgaatttgtaccttgcggcccacattcaccatattgaagaccttactcccgaggaatcacaggcgttgtttgaccagctgttcaagtacgcaactcgcaatgagaataccttggagattgagtgggagcaaccgggcgatctggttctttgggataatacttgcactatgcaccgggctgttggagggcctttcgttcggaaatacaagcgcgacatgagacggacgaccgttcacgattcaagctcgacggcttggggattgaatgagcacactgatgtgaggcaaggacttccttgaactgttgaaaatgtagcgctgggatatccatggcttgtatgaatcattgtgatgttttatatgttgatgaagtcactcttttttgtgttttactctgtattttctgaacattaagtcattttgagacataaattgaataccaattgtttcgcttcgtcctattatgccttgtcataattatagtttttaattaatgcttccattcttgcacaatttgcaaggttcaacagttgcagcatacagaatctacgtgtatggagacgaatcaacctaccgcacgagactgaaatatgatgttctttattctagcaattatagaatgctgctaatactcagcgcgatcctagaaacttagaacgatgcataaaccattcaatgcaaaaccgcctattctatcataacaattggccatgacgattaattgaatttgactacaaagcaccgactcagcgccatataagacagctatacattgcgaagcgaagcgcataacatttaggaggggcccttgctgagccactatacctagaaaaagttgctaactacgcccccgtgtatactgattatttcctgacagttgaaacaagggtctgaaaccctcttccatgtctctccacggagagaatcctcgtattgtgcaggccgcaggtctttacactgcaagtaaattccgtgaacgttgcggtttcctatgctccagcttccgagaaaatgaacccaagggtaagtttccgcgcagttcccgatcttttgtgttaatatccttgttgtgctcacgcgccggggttttctggtatgaccatccccgcagcgtgagttgttcgcctgcaacaagtctgtataaaggaggcgatctttggctttctgagtcttggtgggactgtgataaacacgacggagttagtcgagaattgtgttgaaatcatacacgctggaatcgtgtgcgatagcgagcttgggaaggaccatggcctgaacttggcttgcgagttgaggtagacgcaataggtctgggcggtagaatctccgatggctggttcatcgattgtaagctttgcacgatagcggcatttcatgtatcgtattgcttgaggcaaggagagatgaagaaggatggattctctactacaattgagatcgagcttgtttaatagccatgtgaagcctgacaaaccagacatcagcatttgatcggcacgtaacctccacagtatctcactgactgaccggtgaatttctctggatctagaagtgaagactttggacatcttgcttgaggggtaggcaaatgttgaacctgaccctggagagccgttgaaggttttggatctcgcctcgaaggttgtcaatggtagtaacatgccaggtcttgcaaggaagagtgcatcgaattcaaaataactaagatagtaagaaagaagaagcgagctgtataacgggaagcaaccagtcaatatagctgaccactttgcaaacgtttcggcaatgtgagataagattaaagctaagttctaaactataaaatccgacagtgtcaattcgcctcattcagagaagctcaaacctctaccacgaagctaattgcgaggactaagtagaaatatttggaagttatggaccaacctaggtcttaagactataagttacagttttcataacgctgatgcaagtcatctaagataaagagttgcgccatttactccaataccaagtactgatgacttatgagaaaggaagccatgttgtattgtgtgtgtgtgtgtgtgtgtgtttcctaagagagagaaaagaaggaagattgaacaaggtgggggagcagttcctatcaacctaagaaacggtcttaacaagtacacgactttaaatctaacacgacacgaccttgcaacttgccgcccttcatctccgcaaagacatcattgatgttctgcaccgtctcaacacggaaaggagttgagactacccgttttgccatagccagggtttccattgcctctcgacggttgccaacagtgcttccaacaatggccagttgcttaccgaccatcgcgtgaggataagcgccggcaatcggctgtggatcacccggaacacctacgcacaccagtgttccattgaacctgagatatgatagggcttccgcatatgcagcgttgcttgcgctgcaaatgacggccgctgaagcgccaagcccaccagtaatggccattatttcgtcagcaatgctcttgcttccatcatcgaggaacttggtgacatcgatgaaagcttcggcaccacactcctttacaaaagattccttggctcctatatccaaaccgatgattctgaatcccatgcctcggcttccgagctgcactcccaggtgacctagaccaccgccggctccagtaattaccacccaatccccggcctgggctctgctcttcttgagggctgagtaaaccgtaacaccgccgcaaagaagcggtgcagccacctcacttgccaacccctccgggatcggcgtcacatagtgggcaggagccagagcgtattcctggaatgtaccggggcatgtatagcccgagatttcggagttcgcgcagatgccgtcggcgccagccaagcaaggcatgcagttgccacaggcggaggcaacccatttgatgccaacacggtcaccaatcttcactccggaaacctcacatgacggtcctagctgggcgatgatgccgacgccttcgtggccgccaacctgtccgctttttacaggctctggaagccagctccactaatgaacgagattcagtcaggcaaagcatcccacgaaatttctgtgaagaaagattggtcttactgtttttgtcatgaggctgagatccgaatggcatactccggagtgagtactggcttgatgtcagtgatattcaataacgccaatgagtccaacttacatcttgacgaggacttgcccagggcctggggttggagtatccaactccaccaggcgagtggagatctcgcccgggttgtcatagatcaagcctttgtgggttttggggacttccatggtgagaaatgtagacttcggagaggataatagtagctaacgaaggaccttggtggtgtgaattgggaagaattgggaattggttgttctttgttttatagatgagttccgttcgggacccacccccgcaatcctggggaatccgagcttcgtggccatctgtttccatctccagccgtcctcgaatgtccgcgttcacatggccatccgtacctacgtgtcggctatagatggcgcgcatactaacgggcgcaattcgaaattccgctatgagcgaggattgcggggcgatctattgggatctttggaatagataaatacggcaccatcacagcaaaagcgcacatttatcaccccaagccatatcgcacaaccccttacgaccaagtcaaaaagaacccagtcatacacgatggccgactcaaccctaaacttcgaaaccttcttcaacatagtcaatggcgagagccgagtctccgataccacgacattcagcgttgatccttccacggaatccaagctatggagtgtgcccgtggcctccaagaatgacgtggaagatgctgttcgctctgccaatgaagcattcaagtcctggtctacgacaccctttgaggagcgagtgggcaagctcgttcagtggagacagctttacgagccatacattgaggatttcaccaagctactaatggcagagtgtggcaaaccccgtggcgtagcagccggcgaggcgaacgaagttcttgctctgtttgatcacaacgtgcagcttcgcattccggaagagaggctcgaagacgagagccgcatcgcaatcactcgtcatgtccctgttggagtcgtcgctgctatctgcccatggaatttccctctcgtcttgtctattggaaagatcctgccagctttgctgaccggatgtacgatcattgtcaagccgtcgcccttcacgccgtactcggcactcaaatttgttgaactggcgcagcaaatcttgcctcccggcgtcgtccaagccattggtggcgaggactctattggcccagcgctggttcagcaccccaatgtcaacaagatttcattcacgggatccagtgcaactggaaagagaatcatggcttccgcagccgcgacactgaaacgtgtgactcttgaactgtgcgtataattccctcgcacggcactcgaagaatatcctgctcacacacaagattttctaggggaggaaatgatccagcaattgtctaccctgatgtggacatcgaaaaaactgcccctgaagtggccatggggtgcttcgtcttctgcggtcaagtttgcgtcgccaccaagagagtatacgtccacgaaagcatttacgagccattcctgaaggctatggtggatgcggtctctcaaatggaggtgggcaaggctgacagccctagcactgtactgggtccgatgcagaacaaaatgcagtatgacaaagtccaggacctggttgccgataccaaagcccagggctacaaattcgctctcgctccgcgtgcgatagaaggaaaaggctactacatctctccaagcattgtggacaatcctcctccgaccgcacgaatcgttgtggaagagcaatttggttcgttgatcagtcccatgggaaaaaatgaacatactaattctgctgtgtttaggtccaattgtgccagtcctcaaatggtccgatgaaaatgatgttatcgctcgcgccaacggaacgacttcgggccttggcgcatccgtgtggagtggagatgcttcccgagccgagaaagtagccaagcaaatgcaggctggaagtgtctttgtgaattcctgggcgaaaaccacgcctcgggcgatgttgtctgggcacaaagagagtggaatcggcggtgaatggggctctacagggttccttgagtactgtaacacgcaagttgtgcacttattcaagtgagttcaggggttttaactagtgtttcgatgagtaattagctcggcatagccacaatccatagtataggaatagcctctgtcattgaaaagggtatgatctagttggctcaatagtagtctttttagtagtctttttagggttctctttgtgtacatatatcttctccccatcccaagttttgtaggtactagacagaaaaggatggaaaagggtttaatttgtgaaaaccacttttttgtggaataccgaactaggaatatcgcccccttagaccctaggcaggaaccgaggtctttgttacggtctggtaggaatatatattccacatataagcttggacatacgcatgtgacgtatagagtcccgtctattaccgaaccccacagattttgcggatgcggggttaatccggggaataaatccctttttcaaccctttctgcttcctactccttgctatctgtaaatctcatgcacaatgactcgtagccaaaatctccgtgtctatcgcgcgtgtcagcggtgtcgtcagcggaaactcaaatgtgatccgtgagttgtacacctcagtcaacctccgctctcactaacatttttcaggtccaacttgtccgaagggacaaaaccttcttgcgtacagtgcctccgttctagcaatgagtgcatgcccgccgggtcacggcgcggaggcgacttctcacggtttcgacgtccatacggggaccgaagctctacgccaacgcgggctaatataggccacggactgcatgacgaacaaaatagagacgacgaaaaagtaatggatgatcccatctacgctgagttaacaaatccgggtgatgcgctccagatccttgcccaactcgccgcgaacgactcccaggttcccaatcaccctaatgactctacgaccttcgatcctttcccggtgactccatccacgaagcgaggggggacggataccgctttcaatattaatggtccgatcgagtcgattcagcctcctgtgttacagtcgacattgtctgagacagagacattggtgatcggtgtgttaggcacagatactgtttgccgtctaatacatcagtatgaggccctttatattccgtgtgcgatttcccttctgacactttctagctacgcagcaaattaccacactttttgtcccctcgccccgaaacggcttctggcaacaacggatccgcgcaaggcggcagtaggtgagccgttcctgctgacagtgcttctgaccatcgcatccaaagacgagcccgcatataaggatatccaccaacattgctggaaatatctcaagcggcacttgttagatatactcctcgccacgccatctaccttaagggtcgggtctgtcgaaggtctcctgcttctctcggagtgggtgccttatatgcaactcgatacctgttcctatcctaatatgttcccgaggaacctgagtgccgtcgaggataatatggcctggtcactcatcggccaggcggtgagacattcttatctcctgcgtctagacaaggcatcctttcgggagacggctcttggggagtcgcaagaactcgagaatcgaaaccttctagcgtggatatgtgcgttctatagattcctgctggttccttatcgatactgactagcttagttgtatatatcgccgaccgacagatctccgtccgtatgggacaatcattctggtctcgtgggccatcgctctcgacgaactttacggccaatgactttccaactctacgtctcagggcagatgcagagcacaaatatgcacatgtgctacaggctactattgagctcacgcagcttcttcacaacgtgcatgacactttatacgcgtccaaggagcgaagaactcaaatggttcgaagaggagactacaatcgctacctagatgattttcggcactccatgtcggcgtggaaagaccgttgggatggtctcgagacatctcccaagctgcactgtacaatgcatatcttcaaggagtacgttcgattgtacgcaaactcattttctttccagtcacttctttccagggcagctcatcacagtcgccctgcgggagaaaaccgggcaacaacttcagggccaaagagagccccctctctgtttccacggggcatcatgtcgaccgcagagggtgcatatgtgctcgaagcagtggatgcagcccgggcgatcctgacaatagttgtccagacaatttctcaggcgcagattcgctatatgccgttccgattctacatgtacgtatcactatcaacaatacggattgtctctgggaatggctaattgatcaataggtatactgtgtactccgcggtgtttttatacaaagcggacgtctttggagccgtcgtgagcacagaacataccgaagtcgtcaacttggtgcaacattttatacaagtacttgaagaagctgccattagcgattcccatattgctagtcggtttgcaagtttgttaaagcgcatgtggctcccggacaggcagtgccattctcccaagcgcaacacatcttccaccgcttcgaactatgtaaatacgtcgtcacagcagtgcgaactcccccgaaatactgatttactcgacgacggggctcgccacgatcttgcttctagcatgcaggttcctgagcctgcacaaattcccacgccatatttcaatcttttttaccctgaattctcgactttagagtcagagctggtcgaattcggggtaggctcaactaacttcccgttttgaagccgaatatatgggtggatgttcataatttcacaggcatggaaagccaaatctgtcaccggatgacagaaataagtaactaacattgtatgggagctacctaagtagggtggtaatatcaaattctaagaaatcatgaaattgtcaactttgtagtcttagagtacgctcttagcctttgaaaccatcaaccagggtagttactagctagcacaatcaaggcagttcgattgccaccagaccgatggtggaagagggtactatccataggggggatcagacctttgtggcaaaacattatgatggcatatccatacatctagaattacctcagaacaaccatggcccacaagtatgaattgactggctcacactgagtcgacctcgggatatatcgaatcagtggcacaattagatacatctgaatggcaagtgcggagaaggacccaaggtgatggtaaatatcatcgtcatgatcaaatcattgccaccaccttcgatacacataaatacgaacggttctccctaaattctagaggatataccaaacaaaccgaaataaatcgacataataattatcaatttcttggtatgcttccactttgacccttttccttgagatgagcatcgggagttgatagtggaggaggatgcgatgctctataagaattcttactaacattatcaagacatcatgcctaaggataaaggtcagaacaagggcgagttagcttccgactccagagctaagacccacgctacggaaaaggcttcccacagcgagatggggcctaacgaacttttgagtgaacacatggactctgctggtaacccagtacctgatccaagctggggcacaaccaggccacctgaggaggatgaggatttgtttgaggctgcgaatgcagacacttcggaatttaaggattaatttgggatggaaagggggtttttgatgggcgaaagttaaataattatacaaattattcttgaatttgcaagctatctactgcaggtttcaataactacatgtgtgtctccatgtatgtttcaataggttccagtacaacataagagactaagtacatatagtggagttcgcgggctcattgctatggcaacacaagttatagacggtgacacttcgtagcgtagaaccttggaaatatcatcttgttgctcttatttgtctgttgtcgaattcaattgcaattgcaatttcaattccaatttcagcttccgttctttctttttatattacattctttccaccgaatatgactctgagctcaagtgtgtttactatgaactgaatctcccaaggaaacaacgacagtaccgaccccctccctttcactcattcctgtccacatattccctctccaatctcttattttcccctctcaaatcctcatgtaatcaatcttgcatgtaccactctcttcttgatcgacgacgcgacgccgtcaccgcttgtgtgcagctattaagcgacaacaataggaacatggcgcttgacccgcgcttctatcaacacatcggccattcgggcccaggctcgatatcttcagccgcttcatccgtcatatcggccgccacagggatcacctcacctagcattatctcgacctccgcttccgccgccaccctccgatctacagcttcaagtccttccttccgcgcgcgagacgggttcccgatatccaataccagagatgggatggccagcccggcaccagggggaaatgtgcgtgtcgtcgtgcgagtgcggaagttcttacctcgaggtaggtcttgtttgggagagctgcggggtggcgcggtaccccgaaaatagagggtgtgttctgacctcatcttgcagaaatcgatcgcaaggcagaatgtttgatttcgatggacccgcgtacgcagatgacctgcctgcaagcaccgaaaccgaaacccggcgaccaagggaaactcaagtcccacgcccgtggcaagatcttggaggataaatcttttacattcgacaactctttttggtcccatgacgaggaagatgagcattacgcacaccaggaagatgtgtataatgctctcggtgaagagttcctggatcacaactttgaaggataccacacgtgtatcttcgcatacggacagacaggttcaggaaagagttacaccatgatgggaacaccagataggcccggcttgattcctcgaacgtgtgaggatctgttccagcgcattgagaactccccttctcctgatatcagctacaacgtccgagtatcttatttcgaagtgtacaacgagcatgttcgtgatcttttggttccacgaacagatccaccgcattatctccgcattcgcgaatccccatcggagggtccatatgtcaaggatttaaccgaggtcactgcacggaattatactgaattgatgaagtttatgcgaaagggcgatgtctcacgaaccacggctagcacaaagatgaacgacacatcgtctcgatctcacgcagtctttaccatcactctcaaacagatccaccatgatttgtcaacagatgagacgactgagcgcactgctcggattcggttggtcgatttagcaggttccgagcgtgccaaatctaccgaagcaactggcgctagacttcgtgaaggtgcaaatatcaacaagtctttgactacgttagggcgtgtcattgcagcgcttgccgatcccaagaaactccgtggcccacgaaagggcaaagaactcgtaccataccgtgattccatcctgacatggctactgaaggacagtctaggcggcaactccaagactgcgatgattgcctgtatcgcacctgccgactatgaagagacactttcgactcttcgttatgcggaccaggccaagaatattcggacacgggcacgggtcaaccaagatcaaatgtcggcagctgagcgtgatcaacagattgcggagatgacagagacaattcgcgccctacaactcagcgtgagccaagcagcagtcaaccagcgcgcaagcgaggcctccgatgaaaggctcgaagagtaccagcagaaagtcgagaaaatgcaacgcctcatggaggagaataagatggtcagtgaatgcaagattcgacaactgcaaacagaaaacgacgctttgcgcatgcatttgaagctagcggttgagagtctcaaaaacccaatcccggccattaccctcgagcagcgaaaacctagcattgggtccctgcaagatgagaatcaaccgcccagtcatgacccagaagaccgtgaaggctctcctttagtatcagatgccgaatctgaaatagacgtttgggaagatgatgatacggtcaccgatgatatcaccgacgaagaggcccaacagatgcaagattacatgcatgagcttcttggtgacctgagtgtcttcaagagaaagctggccacggaccatgcccgcttccgtccaatcgaggagcatacgactcagaaacgccgcgccttaggaacccttgtcagcaatcgttaacatgtgaatacaagtttatttttatcttttgggtgtacagggattgcatggtgttggtggcgagctctttgtttgcacttccttgtttgaattaggcccagactacttttggcccgtgtacttagttctttgatagcgaaccctgcgatgaataatgagacatttgacgttatgtatgtttcaatgctagctacctcattgattgggtatcaccattctttcaggccgcattcttatatgaggctatgtccttcaatcagcagttgtaaattatttctgttcagtatctaaccgaagccaaacgagaaactgagaaaattcaacgaatatagttacgctgtttattgtatgcaatgaaccgcaagttagggctgcgccgctcagtgagccgcttatggcatcatttcattttgcgtgagtcaaccctccctcctccccaccatcttcgcagaaccacactcacacgtgaattaattcacagacaagatgacggaaccctccaattcagtgccgaccgcgcaagtcttaactcctgcctcgtcagcactagagcaatctcaacccgtgaccgaaaactctccgcagactctcccgatccgcgactcaaaacccactaaacccaccggagatgcgcccgcgtccacagacggcaccacagataagccgcttagcccagccgagttgaagaagaaagccaaggctgataaggctgcccgacgtatccgagagaaactcgataaggaaggaggcaccatcggtagtgccattcccactcctggtgtcggcgcccaggcgcgttcaccaactacgccgaagaaggatgccgctggtgctggctctgcacagaagggaccccgacctcttaccccgcgccgtggctcaggtcccctcgcgcaaactgggtccgttctcgtggagcaaaagaagaagaaggatgataagaaggttgctgtcttcggccatttgtatggacaacagcgccgtgtcactgtcgccggtgccacaaaggaagtgcaccatgccatcttggccttgggtatgcagttgatggactacactatctgcggcagcagtgcgcgctgtgtggcaacgttgattgcttttaaacgagtatgttgttgttcttctgtttcatgctggtaagacatgaccctatactgacaagtcactttctcaaggtcattgaatcttacacaacccccatgggcacctctctggctcgccacctcaccacgcacctctcgtatcaaattacctacctctcgacatgccgacccctctctatcagccagggaaatgctatccgtgccctgaagctcttcattgcaggcattgatccctctacccccgagacgagtgcgaagatctcactctgcgaatacatcgacagctttatccgggagaagattaccgtcgccgaccaggtgattgcagacagcgcagcacagaaggttcaagacggcgacgtgatcgtaacatttgccggcagcagcattgtcaagcagacacttttgttagcgcacaaccaaggcaagcggttccgtgtctcgatcattgactcaaggcctctctttgaaggcaaaagcctcgcccgcgatctcgccaagagcgggctcgacgtccaatattccctcgtccacgccatcacccacgccgtcaaggatgccacaaaggtcttcctcggcgctcacggcatgaccagtaacggcggcttgtactcccgcgtcggcaccgctcttgttgccatgtccgccaaagagcgcgccagtggcgtcgaaatccccgtcattgtctgctgtgagacgatcaaattcaccgaccgcgtcgccctcgacagcatcgtcgtcaatgaaatcgccgacgccaacgagctgctacccttgaacactcctgtctccctcgtcgttcgcgacccggcagatgcgtatgtcccccctccgcctgagaataagaagggtggaaaccgcaccccggttcccgaacctcctgttaccccgcacaagacctcttcgtcgcctctcgcgaactggcgcaacactcccaacctgcagctgctgaacatcatgtatgatgttacgcctgcggaatacgtcgacatggttattactgagatgggcagtcttcctcccagtgctgtcccgattgtccaccggatggtgacaaacctgtgatgtattgattcttcgcttttttttgcaacatggtcatgaatctggagcgtatcgaacctgtaatctaaattaaaagcaatgaaagtggttccgactgcttaggcgtcatgatttctaggtctgttttgtctttctctcttttatccttgttttccgtttggaatcctcgtgggtcagcatttgggctggttggtctgattgtatgtgtatgtttttcccatttcttacatttatttactcgttggaattttattttagaacaggatgaacagacaataaatctctttatgtacattcggctttggaatacggaatacttggttcccaatgtctataggattgcagggctatttgtacacgccatcaggacatgccgtgggaagtgtttagatgattaccccggaaatggacgcttctctatacaaactcaaaaaagcgccacaaccatagatttgcgaaaaataaaccgcagcttgcaacaatttacatacacatacgaattaaaaagacaaaaaagaaatcgacagctcagagattcgaactctggtccccgaagggactcgcttagcaggcgagcgccttaaccactcggccaaactgccaatagatgatagtttgccactcaataaaatcaatatttcataaggtcaacatttgcgctacaaagactataagttagatggtttacaggttagtggatgtcatggtagactatgaaattgtgctaataattttagggttcggagctcaggggtttatcacctatacggccgtacaatgagacttcaaccgtaacatagatatgtgagataggaaaagaaccatttatagtagtcgagtgcaacttttcaacatcaattaatctcatcacgatctctgaatggccacccctttctcagtagattaatgtcttctgtgtcaccctccgcagtagctattagggaactctcaagctcggcagacttccgaacagcctcttcgaaatgctcattgctgacccagccatcttcacttgttacttctatctgctcccgccaatgatccacaagtttgttgatattaaaccatagttgctcctattcatagaagccatccagctccgcatcggtgaatcgcacaggacaaggtattcctatatcagacaggtggggccagtaatcagccatgaggactaatgcccctttcagtgtcatcaagtttccactccattgcctgccggccctatcaacaagatgctggcgaggaaaaaggatgggatcacgaagagcttcgaggtgcgccttgttcaggtgaccgttaaagatacgatagtagtaagagatgagacggcgtcgctggagttcatcagcttcgaattttttgtcagccggaagcattccgtattccggtggaagtgatggttcttcaagatgaggggttttttctgcatctggattctcgaatgtacgggggtagcctgcgaccagcaagcgcggctcaactgtcgtatgttgtcagtcaatgatacacgaggtggcgccagaatcgggggaaacaaagatgttatttgggttcaaatctaaagatcgtcaggttttgtcagtgatgactgtcaatgagacgtacctgggtggcggagagtgggccgattaagtgaactgtcagcaacctttggaagtaggtatgatgccaatgcaatgtacttctccagaagacggaggtaatcctcgaggtcttttttcccagggaagacatcattgtgcgggaaagcaagttctcacggcttcccgtaccgctgagtccattcaatttccttctgtgcgacagataaaagataatcttgggatcgttccctgtgatgatcaaaatctgaacttcaaagtaatgaaagttacactcacatggaccacagcggagattcagaccggcccttccttcataccaaaacatataatccgcagttggaccaatgcaaaatatctccgagtcttcacatttttcagtgctcgctatatatagcacagcttgaagttcagcgggaacatctttcttgaaataaatgctcccaatagaccggaagatcccattataatcgacttggttgtcattcaataggaagttgggggagttcaacaacacaattcagacattagatgacagagcgggctagaagttttaatgtagaattaaaccactcatcgtccaagagctattgagccgaatgtctatccctaggatcaaacttcgtgatcttacgaatgaactttttgtcctcagttgagacctcgtttgttgaaatatgtcaaagggcatctgcttcccatgaagacggctcataacctgcataagcatatataacgtggaagggggtgcgatttcctgataagaaataggaaatggtccaaagaactgacattgccttgtaggaatcttatgatcatattcatcatgatcagctgagacatcgggcttgaacatgaagtagttatcgccatatatcaatgtgatgagctaataatatacgttagcagggagacaatatacgggtggttgttacacgcattgcacacataccattgtaccaaacgaccatatatcagttgaaataccccagccaattcgaagatgagcctcaggactccgccatatgggtgcccctatgagattttcatcgtacgcatacttggaagtcgcagggatagtacttccaaagtctgcaagttgcacatcagtgaagcttacgccctcaacttctgtgccgtagttcacgagaatattgtcctgtttgacatctgccacgatatagtcagattagagtctgcgcaaaagttgcggtgatcatatattgaccggtatgcacaaatccgccttgatgtagcacatctaatgcttgtaggactcgtctagcaacttatttgatttccactttgttttaagcacatatcgctcgttttctaggcgaaagtggcgaacactaatgaccactatttggccgatttgagacctttcacaattagccttttttcgtagactcgccgggctgatatccgcgcaccttgccaaccagacacagtcctgggcatgctttatagtattatacgaggtcactttgcccttcaaactctgaccaagatggaataatgcagacattttccttcgactgtcgattagttattcaggagaagaatggagcaagaaatatcgcagcaactctgggaaacaaggggcgttgaagtctcaccggctttcttatgtcttatgttggccaccgtcggggtcaagatcatctagggttaaagttaagtaagttaacatttgtcttcacaagacgagagtcacgagacaagccgagggtcttaggtagatgtcgacatgattaaaatgaggcttattgtgacgagaggctctttgtcgacgcaacgacgatcctttggtaacaagctgccggcgcagaacgtgtacagggcctggtacaatataaacaactcttctccaagcactcggacaagccgaacagttggtgaagcaccatttgggggtagtatgagcccaatgacacagtgcatctgtcatttgcagaagcgtagtcaagctactagacctcaaaatcataataagtatggtgggtggttaaaaggaatatactagtacacggaccacccacctgagctggagaaataaaagtggacctgtggcggagacccactctcggattatatataatactatatgcgaggtttatccggtggtgatgagtcttgagcacgccgcgaacccaggggaacttgtacaaagtaagtcaagagataggaccaccagtttggaaaataagtcataaactacttattgtaggtatcaaggcagatgatatcattttcgtagagcgaaaaaaaaaaaaaagccgattgatgataactgttacacctgctcattttattagggagatacgaaatcaggcatttacggtcatgtacatgtgtccaactaaccagccttggaatgtccaattaattatgtgtacagtcaatatttgatcgttctgttatatccaatcataaatgaggtttatggtcaagggcaggtcaaaggagtcagtcctatggatgtatgcactgttgtcgagatcaagagagtaaacaaaggccgtgttgtaactatatggcacttgggagcagttttgagggtgaatttcgctggctgtagatctgagatattagcctgccggtattgctggctccaaatttgctgtgtgtgattcagtaattccctggcagatatgtatatatattttatttcgagacccacatactgcacctcgtgggagtaatcgactctagaaagatatatggcaccctttcaaccacctgccaccagagaagtcggcgccgtatgcggcttttcctcgatgaaacgttctagtaatctgatccaccaccaagatgacccaagggatgttatgcttagattcttcgacaacgcctttctgtatgtatttgttggatgttaccgcgacccacctatcagtatcccagttaaaagaatgaagacaatttatctgtaggtataaaaacaaaaggaataaagattaggtggcgtaggaccaaagagatctcgacaaggcaaacgaagtccaggtacctctatccctaccgacactccggttgggagcgtattatcaagcctgtgatgatcaggtttgatgagagctgatattaattgtttagaaaatagataactacaactttgcatagtattacgacacccccattcgtcgcatcatctggaaactacctatactttcgtggaaagccctaaaatgagtatttaaatctatcgactcgaaaatgcgagaaataaccaaacacttgcttccaactgcttccaatgaagtagttaaactaactaatacttgctttattaactagttatcggtcataatgatttatctcggataaatgcaatatctatcttgttgggtggcaaattatcaccaaataggcagtttggccgagtggttaaggcgctcgcctgctaagcgagtcccttcggggaccagagttcgaatctctgagctgtcgatttctttttctttttttttttttccccctttctttgtgacacagaagacattaatctactgagaaaggggtggccattcagagatcgtgatgagattaattgatgttgaaaagttgcactcgactactataaatggttcttttcctatctcacatatctatgttacggttgaagtctcattgtacggccgtataggtgataaacccctgagctccgaaccctaaaattattagcacaatttcatagtctaccatgacatccactaacctgtaaaccatctaacttatagtctttgtagcgcaaatgttgaccttatgaaatattgattttattgagtggcaaactatcatctattggcagtttggccgagtggttaaggcgctcgcctgctaagcgagtcccttcggggaccagagttcgaatctctgagctgtcgatttctttttctttttttttttttccccctgtcttatacctatacttgaggagttattcccccttctcactttttatacatggagccatttccttcttgcgatacgtggatatgttttctaaagccatataactagtgattaccttggatgttgtcatcgaaattgcacacgtgatatgagcggtgtacccaagtgctattttgccgtcaacaaccgtcaacatgccgataaggcattgtgagcctcaacaagttcattggcaagatattctcacatctcttaagatccctgttagcggatcaaggatccctcaaaatggtaaatactgaaccctactctcgcctagaatcccctagatagtccaccaattcccaagctaacaccaaaccaccagagcaaagactcctccgcctcatacctgcacatgcatcagccgcggctagcagacctcttcgaagaatttacacgcccacacacctcaacagctaccaactcaacaacagacccacacaacgccaacagcgcctccgctgcaaatcgcgaagcagcaagcacaaatgccataccctacgggtcgacctctccctccacaatcccctcattcctgccaatagaagacatctacgtggcaccgcaataccagcccccgaaccctgaagacgaggatgatgtcgtcccagaccagcatgcggcgttcggcatcactcgcgccatggaacggagacgagaggccgtgtggcgcgatcttggtctcgaggcgcttgttaacggcgaaggatatggacctgatgctgggcctttgactggtgctggaggtgctggggctgcaacctctgggcctggggctacgctgcggggtagtgggggtggtgcggcggccgctggggcgcctgttatcagggtcagggattctgggcggaggatgggtggacgtagggttattgggttgcggtaataggcatcagtgtttactgagccttttgaagagttgtcttttattgggattgttgctgcgaaagccaggcgggtaaatggctgtcttgtgttgcattttttactggagcagattctttcgggctggatagccttgttatgatacccacgttggatgtatccttctgttgttatgatatatcttgaagatcattgattcgtttccgtttgcgatttcgttccaagaaccgccaatatcaaatggctgcagatctaacttggtctgagccttaaacgccgcgcgtaatgcgatatgattatacattcccctagatacgaatgatgtcgacccgagcccgctcgtacagtttgtggctcagttgtttctgttcgcgctcgtcctctgccaacagtcggggatggacggccatttgggcgtatgagcccgcggcgcgacgctttgatagggtgcccgggttgatgactagcacactgtcgacgacctgcagaaattataaggttagcaccatcatggaaggtggaagtaaaaattttcggctggggataacatactttcacgaaaggcggcagcatgctaggcacaattagaatatcaggccggacattccaccactcgcctagtttcatgtagggaatatccagcatagcacctgtagccatgccaccttcgaagccgggctttggaagatttgaccgtgcagtcggagggaacaaggggaagaaatggcgttgctcgatgagatacttgggcagacgggtgagcaggttaccctctgcgggtcgaccatgcaagacctcttcgcggcgaagttcggaaagcacatcgtgtgagcacattccaataacgcattcgttgaatgacaatgtggcgggattcgagacaatgcggacctgcttagggagaccaaggtccttcctggggagctgctcctggggccaggagacgtgtcggctgagtacatcgcggacagacggaaccagcacgatcgtgatgcttgggacagctgctgcaagtcgtgctagtgacgttgagatacagtgccggaacattagggacattgtagctgtgtccggatcgaggcccttgatgtctggcaggtcaaaatcgcccgatgcaagaagagggtgctcgatgtccaggaacggtcccatcagcaccagactgtcggcgtagttttcggctgccttctgacatagttcctgcagtggctcgaagtccagattgtcgtccgctgtgtagggaccggccgcaaccatgatattaagcggtgggtttgcatctccgtcaagtcgctcgttgatgccgtctagtaccatagctgaagatacggccggtggcatcaggggaattgggagcacttccttgacagtgaaatattcaccagaagggttgattcctcggagagccacgatttggcctgggaaaaagttcaccgagggtacggaatccaccttcaatgggactcgtctgccggctccggtccgacgcgaagtctcaagtacgagggatgccgggttcagttttccctcgagactgtcggaagcgatccgcccgacagcaataatctcgcttgtactctggatagctgcacttccaaatgtaatatcgtctgaattgaattctgcctggaatatagtcgcgaactcgtctatacgatcatccagaatttccgatgcttctgacaatttcatgcccatgggcttgtagccaagctttttgaggtccgtattcgctgttggcttgatgcgcgcctcggaaaatggcgccattggggttgctggctgggataagtgcgcattgagggtttctatcgtttgaccaggattcggtcgatcggagaacgaaactgctctgttcctgatgtcagcaccttcaattgaacatacacgccccgaaagtacatactgcatgccatcgccaggtgttccagttggtgtttttgtgccggcttgtgatccaaacttttcgaacttgctgacttttggtgtagcgggggaggtgaattcggccttgcgcttcgctgatccaaatccattcccagttcgagcattcgagccagttggtgtcaattgatcgaacatcccaaacatatcgccaccagctgcagccgcgccccgcggagttgctgtgtttgcagttcgtttttctgtgtgccggccggccttgtcacgactttcgcgttccaaagcttcttgaacatcttgcttgaagcctcgcactgtttgcatagtcaaggttaccccttcgcccatctttatgctgtatgattcccatttgtagaacagctcctccgcggtgatcgaatgcacccgcagtatggagaagagctcggcaaggatgtcttttgggattccatcggggaatgagcccacaaaaaactcattgagctctccctcggcatccattatggcgaggtgtgtatcgtggaagggcaatggacattgaaagtgcagacacgcgcaagacgcgtgagaccgtgtcgctgacctaagcggcccaaagcagtaatattattcgagtttgatcggagtggacctgtcgatcgcgagaattgtgattagcttgcccctaaatttattattcattctctagattcccacgtgtcattgtaaattctatatatttagatccatcaagatcatgtcgaactccgaacaaggcgctactgtgcacccgcccaccaatggcgatactgtgtccgataccaacatgcaggcatcggccgaatcagcccccgtgaacgcccaggacgagtctacttcaacctcgcagccaattgacctcgagctaccgacatccgctgccgacggtctcattcagaagcctttcggcaagccgctggacacagccaagccagtcgcacctgcgccgcttaccccggaacaacaagccaagtacgacactctgttgaagctcgtttcatcatggaccacagtcgcagacaaggccgagaagaatgccccgacatctcctataaccgaggatgagcagatgttcttgacccgcgaatgtctcctgcgctacctacgcgcgaccaagtggaacgtgtccgaggctgagacacgacttcagagcactctcacctggcgccgcgagtataacctgaagaaattgacgcctgattatatttcaatcgagaatgaaacaggcaagcaggtcattttgggctatgatatcaatggacggccatgtctgtatctcttgccctccaaccagaacacggagaagagtgaccgccagctcgagcatcttgtcttcatgctagagcgggccattgatctcatgggacctggtcaggaaactcttgctctgattgtcaacttcaaagagacgaagtctggccagaacgcaagcatcagccaggccaagcagacggtcggcttcttgcagaaccactaccctgagagacttggtcgggctctggtgatcaatggttagtgatgtcatatcccagtcaatcttatgacaagtgactaacctcctatattagtgccctttgtcatctggggattcttcaaattgatcacacccttgattgacccgaatactcgacaaaagctcaagttcaacgaggacctgcgtcaacacgtcccgcctagccaacttatgaagtccgtgggtggtgatgtcgaattccgctacgaccatgcatcctactggcctactttgaacaagctggctgaacagcgccgtgaggcgtaccgtgaacgctgggttcagggtggcaagcaggtcggcgagtttgagaactacctgaagggcgaggacgttcccaacctgtcccagaccaaacttgaggccaaggccagcgaacaagcttgatgggaagagcatattattttgcgcctattttggtgcatttgcatttttggtcaccgtttatttcatcttttctattggtcaatagccggcatttggtcacagcgttggattgattactgttggattgttttacatataccgctctgtttcgacacgcctgttcatagacatgtcaatctttgtcaataattaagcgataactagagtacccaaattatagatacctaatttcttcagtttcctgtttcctatcatacatacacatcaataaaagaagacaaaacgatagatattgatacttgattatatataggccggagttagtttggatgcaaaagtcaatcttgttgtagcacaacgatcacagtaagcaagaatagctggatgcagtcgctattatttctctagatttagatagcttctaatcttaacaccgtcttcattaaatcataagcctcatgtgcgtatcatagccgctctcttctatcagatactatactctagattaacaaagcttctccaacggattggcgctattatcattacagcatgactggccgaagaagaaatgttgcctgtagactgttgtccaacgcctttctcgggggtcattggttgaaaatggtactgttgggattacatcgtccttggtagatacttattctagcccgacgatatgtcggataggttaacccgatggtgacgtaaatgagcacataaacttctgcttgacctcttgggcaaaagcatcctcggctgctttctttttattgcgtaaaacccatgggacaaatgtaaagtggagctacaggtgagcccatgggcccacctgtgttctggatatcgcctactgtaagcaaaccatcctcaaccaatgaacatcctttggccttcgggccccagtctgattctcttccgaacaccacgcgaggatatccatgaacagtaaaaagtctaaatgtatctaatcaatcagataaaaattcaaattcctccgatgatcgagtttccatccttccatggaaagtttggtggcgctaattgttgaattaccagaataaagatatcagcagggtgcttcgggcgaagtatggcattttctcgctggagaccttgtagaccgttccgttttaatgcctactctctgtcgctttttgctcactgagtaaaacctagcatgcccttgaataccacgtgactttacagtcagcagctcagctcaatgtaaaatgcaccacgctagccccatccaatgaagtctttgaccaacacacaagcttttgtgatagggcgatgtagtcccagagataaatagagtctcgggacaaaattcttggtacaatctttgcagcgcaacatttaacaacatcgcgcatcatcgcatcataatgggggatcaagcaaacaagcgtatcatggatcaaatcccagacacaatcctcaaactcctccaagaagttgatccaagaccagttcgaatactgggtggcacccccaacagcttactcgaccctggagattatttgggatttaatacgtccatttgtgtcaaaggctcagtgttctattcacaagtgtcgtccagaagtccagactcgttttctcgctgtgaacgtataccctggaaaccctacctgatttgactttctaattataatcaggaatggaagctgcaatgctgggggcggctcagcccaagtatacaaccttaaagacgaccatgagcgagcaagaactaatatctaccaaactatagccaattccttaaagtgacacaggatcttaacgacatacccagggttcatattccttacacttttagatacagtgctgtatcaggacttcgtaattaacagtgggagcccatgacctacaataagcggtatggagtaatggaggcgatatggcaagccacagaataaatggccatagtcagaatacacgtgactaactagagcatgctcagtctgagcccgtgctgacatctacttgctgatcctgagcctgagcgccctcataaacggcggcagcctagatgggaaaggcctcaccgggcagacattatcctgtctatacgacgtatagctacatataaactggtggctaacgtcggtaagactaaagagttcggaataaaatagtctgatgcttgcatattccttatacaaagtgtcggattttacattactccgtactccgtagaggttccaacgttgacaaagtttttcactttccgaatcggttgagcgggtacactatgtcctctgtacagccaccgtattatgataagattgctatcaatcagttggatactcggtcagaattctccgggtattccccgtttccccgtagccctgtaggcccatgctttggacccctcattaatgtaattatcccgactaggttgctcaagtgagaattccggttttcggagcgcgtttagcgagacttatctgcttctaagccttgcattagaggaattatcccgactacctgagcccatgggttgaatgaatttaggaccgggcagtgcttagttaggtggggaagtacgggctacgtccacgagataccaagacctcgggagaccctgcatgaaagcttagcgccacttggtaaaattactagttcacatgtcaaaatcgatttccaatctacaaagtacaaaatgaaaccttgggagctcgcttcctcggcccaatgatcctgctctcgcccagtggaccactcgccgtaagaccccatccgatattcgaaccgcccgatctctctcgattgattaaatctgaagagccaagacaccagtgcctgcacgcttctccgaagcgggacctcttgtctcaacgggtgctaccggatcttcatagggacggcgcagaatgaaggctctcgtcttggccttggcccttgcgacgctgttcatagccgggtcaatgatcgggatagctccacgcttctcacggtagaacatcagcgcatagccaatcatgacacagatccagtataagttgtaggagatcacggagccgtaatcggccgaattggtccaaccaagaagcgcgttgaagataccccaaccgccgccacctcccagctctgggttacaacagttcacgtgccagacactctgtcggatgtcgtaggatccggcaccagagccagtctccgacgcgtcgcctccgatgatgttgttccaggcgttgttctccaagtaccacacaccacgcgagaaaagaccggcggcaacgaggtagaggaagcaagtggaaatgatcaagaagatctgcatcgaagtctgccgtccacctctatcggtatgttagcgctgtatatttatcaaagacgatcgaatcgacataccggtagataacaaatcccaccgcgataccagccaaaaggccgcaaaagacggccaaggggaaggaggtggcagggagccctaatccaacaccaccaacatagacaacggcttcgagaccctcacggagaaccgtgataaatggcaggatgaacatgacgtatttctccaaccatctcttgacgcgacccttctttgtctcgttaggatcgtgctcgtgttggagggccttggcgagcttgacacgccatttgtcttgaagtttagacacgcgcagaagggcagcgcccatcacagtgatgatgatcgatgcgatgattcccagaacaccctcccaaatatcctcggtgctggagaatgtgtccgttccgaggccgtaaaaagcaccaatcatacctgctccgactgcgagacaaataaatagacctaaggcgcatcccagccagacctatttgttttagcagatgaaattgcataggagtgtaagagccggtcgcttacttgtttcactagtcttttatacgtcgggcgatcactctcgtagagcgattgtttcaagaatgccagtagaactgacacgaccaccgtcgtctcgagacattctcggaagcagataaaaaacactgattgaatatttagtaagtagttgtgtattccaaaaagcagatgaactataccggtgacagcgaagaccttgttattgcccatgatgcttgatatgactttgccagttccccaaagttcaagggagaagagactcaaataatataaagccaccggaaagcaaagcacccgataaggtctcttgtagccgtctgaaaaatatatatcgaaattcaaaattcaaaattacgcgggagacaacaagcgtttcgatgtctaacgacccacctgtattgatccgattgagcttagcattcttggagggttccccgtatcagaagcttttttgggcatctggcattatgattcgtggcagtggatatgtcttgaacacgaacgctcacctggccagggtccagccaccttagttgagttgaatcggaaaaataaccggcctgaagggatagaggtcatgccatattccttaatttggcaggtgagcagaagttcataaaaatgtgattcgttcaccattgaatattaagcgaacaccttgccttatggctgtgtccaccgttggtatacctggaaccaaaccaataagaagggggaaacctcccatggatttatatctgattaggatcagaaggatcggaaaggattgagtttccccttatcaatcttgtattgcgctcggactattccaaacttccgttcccaagcgttcccaggctttcctaagctcatagtccttctattcctctcttcacccggaaactggaaattcttttcctgcttcttccccggcgaagtattcaagcatgactgtatatacaatgctgttccgccttgcggcagtactacttcttgtacagtactgtcaagcgaagacagtgaatctggatttcaatgtcacctgggtcaatgcaaaccctgacggtctctatgagcgcaaggtggtgggcattaatggccagtggccgctacctgtgattgaagtggacaagggagatcgcctgattgtcaatatgtacaacgggcttgaggacaaggagacttccatccattggcacggcatgttccaaaatgacaccaataatatggatggtccagcgatggttacccaatgcccagttgctcctggcgcctcgattacctacgacttcaccatcaaccaaaatggcacttactggtatcattgtcataccgatgcttgctacccggacggctatcgacaggctttgatcgtgcacgatgatgaggcatatttcaacgatatgtatgatcatgaggttaccgttacgatgagtgattggtaccacgagcttgttgaggacattccgttcattcgtgtccaaaacccgacgggagctgagcctgttccggatgccttcctcttcaacgacactttgaacaccaacattcccgtcgaggctggaaagacctatttgatgcgattgatcaatattggtgcctttgtggcgcagtacttctacatcgaagatcacactttccgcattgttgagattgatggagtatacgttgatgcgcaagaggccgatactctttacatcgctgttgcgcaacgttattctatcttggttactatgaaaaattccacggacaaaaactatccgatcgtgacagttgccgactcaattctgctggatacaatctcgccttctcttcagctcaatcaaaccaattggctcgagtacaatagcaatgcagcgcatccgcaagctgtaatgaaggtggatattgcctccgaccttgtcccatacgatgacgtgaagcttgttcctcacgaccggatggagctcctcccagaacccgatatgattattgaggttgccgtcattatggataatctgaataacggtgcgggctatgcgttcttcaacaatatctcctacacgaggcctaaggttccaacattatactcggtcctcacatctggagattacgccacgaacccgcaggtttatggagaattcacacatccgttcattctcccccacaatgcggtcatcgaggtggtcctcaataaccaggacggcggttcgcatcccttccacttgcacgggcacaacttccagctcgtcagtcgcactccctcatatggcccttctttcaatgactacgccgacggtgacccacttccttacaatgcaaccgataccccctctagcaccttccccaaataccctgctcgccgagataccttcgtcgcaccaccccagggcaattttgtcatccgtttcgtcgctgataaccctggtgtttggttgttccactgccacatcgactggcatatgtcgcagggcttggcgatgtcattcatcgaagccccgaagcagattcaagagcgaatgtcgctgacagagagcgaaattaacctctgcaaggctgccaacctctcctacgagggcaatgctgccgctaacacggaagatctgctcgacctgaccggtcaaaacaagcagcttccgtggctgcctgctggatttacggcgaggggaattgtcgcaatggttttctcctgtgtgtccgctttcctgggcatggcgttcatttccttctacggtatctcaggcattcaaaaggagactgctgtggttaccgaacatgaggaatcgtgaggtattttattggatttctgctgtactttaatatatatatttgtctttcttaagtggataaaaattttcattcaccttgaattgttcggttatcaaatattccttgcatgtggaatatagcaatacacgtctgaatggtactttccaagtgaaatttaaaggacaacttgggcttccccgcaatatcaaccctcggtcatcggctttactttccattcctgggaagcgacgctgagaagtacggcatcgcattctcaggtatgttgacatttggcagaaatgacaaaagcctatgtaattgggcttcagcagtgaaaccttaacagtataccgatgcccaagtcccttcccagttttgggctggtaatatgcctcctcgtgatcttaccctcagtggtgatcacactagcatactgcccccgctgcggagcatcagtaaggcctatgcgcctgtgtatccattttggtatgaaatcaatgaacgatagtggaccgacaaattaggttctcctagcgatgtcgctgtcgtcatccacgctggtatctgcaccatttctgatccatctgaatatgaaaatgatggttactgcgggtttggaattatcgaggctcgcgagattgatgcgatcaatatgctcgatactactggttagctcaatgtggtgattatgtgctctccaactcatccgcttcgaccaggaacggatggcatcaccaaagacatccgtgatcgcgtcggaactgacaatctgatctgtctttcgattgacatcgacacccgaatctgcttgtaagtgtcttttctggagaaggcaccattatttattgaggagttccatgaacttcaacggggcggaggtaaggcaaatttgctcgtatttacgcccatagccgtgtcaaagaattgaagaatggaggagggtttgaaacccccatgtcaggttgtaaacaatgatattcggtgcttatggacaggcgttagggttcgggttcgggttctagcatatgcagcgcaaggattttatttagcctagaaatcgaaaaaaagctagttatcgcggatccttcaacggtttgatgatagtggaccttttttccaagccaatccaggaacgaaagtcaaaaaagacacatgtttcagcgcagtttccacgctaatgggtataagaggaagactagatatcttgggctcgagatggatagccaattacagtactccagctggaaagttcaagcctttagacataccacggagtactctccaggagtactaattatgttgtaaagaccgtttgacatagcagtggacatcaagcgattccccaactctgagcctggctccgcatcgcggtgaattagggtggaccccgggtctaagagaactaccggattggtttggctggcccgtcttggacaccattgggctccatctggaagtgaacacgcagcgatcggcatccagaagggccattgggtgagtgggagggtcgaaaggaaaaatgagctcggatagttcctttcagcccctcaagtgcaccctgatagagctaaaaagcaaacctgaaacgaacaggcacaacgtggagacttgaaacatccggcagttttaatttatggagataagcgtcggccataatagttcacattggaagatatgtcaggcaaggcgtgacatgacactattgaaccatgtgctcggagtattactcaatgggacattgctacatagttatttagatagtagttaggaccccctacttagtagaagatactaattaatacaaagaaaagactccgaaccttcgtagagagtacatggagttccaacgatccagacctcgggaggttgattgcccctgaatccccaaaaataaaactaaaaagagctttagagcataaaatcacccttcatcttaattaaacgctagactgttcccagcagtgcacggtgtccaatttctccagcatctctctggacctttcatatttccgcctccctactttctgcagaactcacagaggggactgacaggtacgcgtctggttgttgatgtgttcttatcgatacggaaaaaaagatacttagggggggctaacacttgacttttctccacattctagtcatctcctattttacgcttcatgactccacgcgctatcgattagcacttcgaatacattctattttcgtttcacctggtgcggttctcttggggagagagagatggccgtctcaccgccagcatcacccactgcacccccgcgccctatcagcgctgtcatgcgcactccgcgtagtaccagtcgtttaagtatgagcagcaggcaaggtggaagtcgtacatcggatgaggatggcaagactgcagtcaaagtcggtatgtgcattcttccccctgatcggcccattccatgcaatcaaggatacacaacatcggctggcaaccaaattcaggactgaccttgcgcagctgtccgtgtacgaccaccactgaaaaacaccgatcctggttatgaattgattccccagagattccagaaacccatagtccatgtcaccgcgcccactagtctggccgtcgatgtgggcgctgcgcgcaaactatttgtgtttgatcgcgtgttccctgaaaccacggaacaggaggggatctgggaatatgttagtgatagtgtcgactcctttgttctgggttacaatgtctccattatggcgtatggccagtccggcgcgggaaagtccttcacaatgggtacctccggtcccacggagcagaataacatgcagaatatgggtgagtttgaaatgcgttggtttcccaatcaactcagggactgatcgtgtgtgtgcattgtgatttaggtatcatcccccgtgctgcacaggtcttgttcgataaactagaagggccctcgaaacataaccggaatagctcgcatccgactactggcctccgaacacctcaacgatattcaatgacttctgccgggagctacgggaagttgaatcacgagaaagaaaagagttggcagctgaaggccacatatgtagaggtgcgcgtttattttagggcttgtttgctggcagcgcattgttctgaccattgtcctacagatctataacgagcacctgagagatctactccttcctgaaacgacaaccacaaccgatcgcagcaacgtaacgattcgtgaagatacgaagggccgtattattctgactgggctgcaccaagtcaatattaactcattcgacgatctgatcggtgccctgaactttggctcggcgatccgtcaaacagattctacagcaatcaacgccaaatcgtctcggtcacatgccgttttcagcttgaaccttgtgcagcgcaagtcctcaccaacccatgcgacgccgagtcccataaaggagaagcgtatgtcgatgccggtcgacacgttcaacgccggagaaacagtcactgttgatagcaaactgcactttgtggatttggcaggtagcgagcgactgaaaaataccggcgcctccggagaacgcgctaaggagggtatctcaattaacgctggtttggctgcgctcggcaaggtcatctcgcagctctcctcacgccaacagggctctcacgtctcgtatcgcgactcgaagcttacccgactgctccaagattcgctcggtgggaacgccttcacgtatatgattgcttgcgtgactcccgccgagttccacctaagcgagaccttgaacacaatctcatatgctcagcgggctagagccattcaaagcaaaccccacattcagcagattgcagacgagggcgacaagcaggctttgattgaacgactcaagtccgagatatctttcttgcgcctacagatccgcaactctgaaggatccgagcgccgtgaaggaggacccactgaacgaagtgaacgtaagaacgaacgtgaaaagcacttgcagaatcagttgttagacgtccaagaaagctacaattccctcagccagcgccacgccaagttgatttcgaatatggccaacgattcgcactcgcctgctgcccacggcgaaatggacgacgctacctccgaaattgggaagaactcggttgagagaatgcagcgatcaaggtcctttgccgagtctgtggagcagatggttctagagtacgaaaagaccattcaaagcttagaatcttcactctctgaaacacgcgcctccctctctatcacggagagtgatttgctcgaacgcgagaccaagtgcgcctatatcgagacggtaaaagaacagctccagacccgggtccagaagttgacggaccgagaactcaacactgagaactacctccacgaattggagtccaagcttgatggccactctacaggcgaggagaaacacgctgccattgttgcggaattgcgcaaggagttaagccgggcccgcgataacgaggccagctgcgaggaatacatctcgacacttgaagagcgacttgcggagggtgatcaggacatggaacttatgcaacgcgaggtgatgcgcttggaacatgtcattgagcgccagcgaggcctcgggcagctagaccgcctactcggcgagctggacccagaaaatggtggggatagatacgacgttgccaatggcactgactaccaacactatcaccagccaagccgtttgcaggcctctcataggcacacgccctctctggacgttctcagcgaagcagcggagacagccatcccggagtcagacgaggatcttgtcgagccgaccatagaggccgagctcgaatctatcggagaatccgagcaggggacgggtgaggacttgaaggttctggaaactgcgactagcaagctggaggcacgtcgcacggaggctcttcgtgaagacccgatcgcaagtcccgctcagtccaaattcgttgccgacaagcttgagactgtcacccaggagctgctcgacctgcgtctgcagcatgagaacaccgttggtgacttcgagaacctagaacacaaataccagcaggctctcaaggcccttgaagagcttcgccaagacaaaattgacgaagcctgccacccggcacctagtgttcaaaaccaactttcaccgcgcccggtgacttttttagagaatggaggcactccgacctcgaagcctggagaaccacactcattctcgcaatcactctcatcggaattatcctcggtcggggagcaatccactttgcgcgcattctctgaggacgaatcgaaggcaattccatccatgccctcaacccctcaagtgcaggtggactccgaagagtccgagagcatgcgtaatatgcttgctgagcatcaggagagtgctgagctcatgacccagaaatatatggagttgcaaaacgagcatgagcagattctcggactggtcgaaaagctgaaggccgaggctcgcgccaagtcaaactcaccccctacaacccctggcatcaaagtgatccgccgcatgactagccagaacattctgtcaggagttgaccgtgcaaccagagccattactgggcttcggctccttgcgtccgaggagtttgctgacaagccggacgctatgctcaacttcgactaccatctggatcaaaccatgcacgaattgcaaagccgcatggagcgcctccaatctctagaagccgagaaccagggcgttaaaaaagaaatggaaatgaaagcaactattatctctggcctgaccagagaacgctcgagtctgcagggtgcttcgcctgtggacatggctttagtgtcgcaactgcgcgatcaagtcgtctcccaggaaaggcagatcaaccaccttcgagacgctcatgaagcccgccaaaaggagctgttgactgagattgatactttgaagggacttttgaagtctcaagagaacgctagccgggcactcgacgccggtgccgaggagcaggaccggaagatcggtgctctgcagggagagctcacggagtggcaaggcaagcacaagagtgctctagagtccctgcagtcctcggagtcgcagctcactactactcttgctgagctggagggtgctttggcttcggtcgctgctatgcgctctgagcgtgctgttaccgattccgactctaccgagaaagaagtcactgcgcaagagcttgagggtggccgcgccgaacagcaggagcttgtggatagcctgatgaacaacatcgaggatcacaagtctactattgctacccagcttgctacgattgccgggctggaagaatccctctccggtgcccgggaaaaactggcttcacagaccactatcgaggaagagaccaataccggtgctgttgacctgggtctttcttctcggatggccgagcttgagcagcaaatttccgcccacaaatcgtttgtcgattctcacaataatgagctagctacactccaggagtctcacaagcatgaactggccgagttggaggagcggactaaggccgctgcccaggccgagtacgatgctcgtctggctgagaaggatgctgagcatgagcaatccatggcgactttgcagaatgatattgcagagtctcgtaatgagttagtcaatctgcttaaggctgtgtcgactcttctcaactctgaagtctccgccgagaacttgacggatcagatccatgatgttttggtccagaagcagcacttctcagacaagtatgccgagcttatggacaccaatgaacaccttcgcaagcagcttgaggctaacgccgatgctgagagtcgtctggacgaaataaccaagaagaacaacgtccaggacgccaaggtcaatgagctggctctcttggtagctactttagaggatactcttcgccagaaggacgaacaggtcaagaagaaggaagccctggtcgaggagatcacaatcgagaagcagaagagtgtgcgtctcgtggaggagctggaggaacaaattacaaacagcttcgatcagcaccacaaccgtctgtccgtcattcagcaggagcgtgatcaggccctggaagatgccaaagccaagattgtgatctacgaaggcgacatcgagacgtaccaagtgcggatcgagcaacttgagcttcaaatcaagaacaccgaaggctcccatgaccgcagcagctccctcacctccaaccttcgcaagagctcttccgccgcctctcttccctcgcctccaccggcgatccctctccctcccctccccactatcgcctcgcatcccaacggcgcttcgagcgtgtcgccgcccagctctcgacacgccagcaaagagctgtcccatgtccaaatggtcgaggagcaggaggctcgaatccgaacaattgagaagcacttgtacgccgagaagcagctgaccgccaccttggaagaggccctcggcgaccttgaactccagagtaccaaggtcaagaccgactgcgaggcctggaagaagaaggcctgggaattcgaggatgaactctccaacctccgcaaggaacgcagctctgcccgtctgtccctccaggccgtcgaagaggagcgcactgcccgtcgtgaggccgaggctgcgcgcgctcaactcgaagcgcgcatgatcgccctcaacaagaaaaagaagaagagcaccctcaactgcttctaggcgtttttgactctgaccttgctcgcgtttgagctgttccagcgtcaaaagcaatcgcattctcattcgtcttaatcgttctgtctggttgtacactttttaccttctctgttactcttgtcttctttttattttttatttttcttattcgtcccttgtttcataccccttttttatttgattccaagcagttagtcaccgatttccgtattatgagctttcacgtttttgtcactttcccctgtcgattccgtcaataccttgtcctccttttctcactccattcttcacatatcttttctttttctacttgcactcatgaacctatcatgacttgtagatctttttatcgcccttctatcatccctacgctgaataacctcgatgttgtacattccgtcggctgtttctagattccgttgaatcttcatgtcgcaatcggggggaatcttgtcagctctcagttgcttttctgcacttgaatttcatatgaatgttccctcgttcatcttgaaattcttgattcgtccattcttatcaatgaagttaccaatgccagcctacttattctttctcgctgagcctgtagagtacaaatctgataggtttcgaaattcactccgtgaatctgactgagtaaagagcaagtagataattcgagcttcatactgcttcgttgaaccatttagtaagatatcactctacgttgtcttcaactgctttgcaccgatgactatattggatactcggcatgatagtacgactaacactaagcccaccacggccttaagagcaccgcaatccaagggtctatatcctaggtattggacgttacaatgagctaaaacatcatcgagactaaatatcagacaaatggatcaattgaatttgtgtaataacactctggcatattcgcatcacatgacgcgtataccccacgtgtctttaagctggttgcaacggcagctccaatctccaagctccaaaaacaactcaccatgggcctccaacggtccgatgtgacaataatccacccagatctgggtatcggaggtgccgagcggctaataatcgacgtcgccctagcccttcagagccgaggccaccgcgtaactatctacacctcccaccgcgataaggcgcactgcttcgacgaggcgcgcgatggcacgttggacgtccgcgtgcgcggaaacaccatattccccgcccatatctgcggccgactccacatcctcatggctgctctgcgccagctacatcttaccgtgtcactactaggtgagcttgggacaagggagaccccggaggcagctactacaaccaccgatgacgaggatgaccgcgacgatatcttcattgtggaccagttgccggcctgtgtgccgtttttgaaatcgttcggccgcccgcgcccgtcccgacgccagcgcatcctcttctattgtcacttcccggatcaattgctcgcgcgccgagatgagggcggctcgcttcttcgcttggcgaaggtactgtaccggtttccctttgattggtttgaaggctgggcgatgagcgcgtcggatcgggttgtcgcgaactctagattctcccgcggggtcgtgcgtgacgtctttggctcggaccggttgggtgatgtggaggtggtctatccatgtgtcgacatggatcccggggtaccggtacctgagaaagcggaggaagaccctctctggggtgggaagaagatcctgctcagcatcaatcgcttcgagcgtaagaaggatatgggtttggcgattcgcgcttataatggactgggagcggagaagagggaaggaacgcgattggtgattgcgggtaagaaactgtgcacagatttgcgatttgtatgaattctaacatcgtaatttttaggcggttacgacaatcgtgtccacgagaatgttcactaccaccaagagctgaatgagctcgcgaccagtctcgggttgaagaccgcaacctccaggacagtgctatctgcactttcaatcccggagaacattgatgtcctcttccttctttctgttccgactgcatttaaagatacgctgttggcacaagcaaagctccttctctacacccccatcaatgaacactttggcatcgtacctgtcgaagcaatgcgcgttggtcttccagtgctagcatctaatactggcggcccactggagacaattgtcgagggtgaaacgggctggctccgggatgcccacgcagatgaagaatggactgctgtgatggacaaggcactttacggactgagccaggaggatcttcagcgcatggctcttgctggcaagaacagggcgcaacaagaattctcactcactgctatgggcgataggctagaagaagaaatttccaccatgctgaaagctgaaagaaggccatttaatgggtggcagcaggtctttgtcattcttgcactggttggggctcttcttgcggtgatggctgcagttttacttcgagtgctataatgcatagtttgcgtcacgcattaaaattttgtactttatattagtctatagattaatctttctcgagttgcaccagtttcccatctcctgtactaaataaatgttttgtccacccaactttaccaaaacactctcacatccaagtcacatgacctcgtgtgttttgctcgcggtgacgtcgcgtccccctctatctttatccttaatcggccgccctagtggcattgggatttctcaacatgcccgaagtaatagaccttctatcctccgatcctcctatcccgccaaaaccccaaccgcaacagcaagccgaactcccgtcgcgacttgcatcccaccagctcaatccgatttcgtcagacccgttcgatacatccctgttcgactatgaagacatcttcgacaagccggccaagaaacggcgagtgagcgatcaagacacttcttcagtgcgaaaaagcaccacgccaaacgagcctcgaggtccggcttctacggcagagccatggttctcgatctccgatgatgattttgacctgccgccagtaaacaacgcggcgaaaaaaaccaattcccagtcgcgtgttgaagagtcggatccaattgtttttacctcttcggccccagctcccttgaagcctttgtcgcggaaatcgaatctttcaacccgggatattgttgcgcttgatgacgatgacttactgacggatcccatgaaacctccgccctcgagttaccgaggacgtagcgatattgatgaattcagtgatccgttttctctgccggagttttctgacctactgaagaaacctactgtctcgaataccatcttctccgagtcgactgctcgcctattatctcgccttggcgaagatacttcaggccctaaaacaaagtccggtactcgaaaacagaaaggcaccagcttggaatctaaggctgcagaggtcctctccgatgatgagattcatgaaccagtagtacccaaggcagcgaagaagacaagcaagattacttccgctgaaaaggaagcaaaggccaaagcacgcgaagaggcaaagctgcagcgacaacgagaacgcgagctggagaaagagcgcaagctcaagctcaaagaggaaaaagcgaaagagaaacaacgggctgccgatatcgcgagcgtcaacaagctgaaagtaaacaaaaaggattctacaccagagatgatcgtcgacatggctacatctttcgaggacagcagcgtcggcactcaaaccgtcgagttcatgaaacgactcggcgtccaacacacattcttcacaagcgcaattccccacgtagtaaaatggcgtcgcaaaatgaacgccacatacaacagaaccctacgccactgggagccctgtccattctttattcaaaaggaagaccacgtgctgtgtctattatccgcgcaagagttcatcaaaatgataacccccccaccagacgacgaagaaagagaaaccctagaaatccacgtcctccgaattaaaagcgcctacccagagtgcaaacccatctacctaatcgaaggcctgaccgctctgatgcgcaaaaacacaaacgcacgcaacagagccttccaagccgaagtcctgcgccaactcgctgaaacaacggtaccagaggaacagaccacatccaacagagcccgaaaaccaaagaaaaagccggatgcgacgcccctcgtcgacgatgagactgtcgaagatgctctgctcgaactacaagtcacgcactcctgtctcatccatcacacgaccgcgccagccgactccgcggagtggattaagaatttcaccgagcacatctcgacagtcccgtaccgtcgtgaacgacaggaagcacacaatgctgctttctgtatggacaccgggcaggtgaagaccggcgccgataagaaagatactttcatcaagatgatccaagaggttagccgcgtgacggctcctatggcttatgggattgtgggccagtatccctgtgttgcggatttgactcgcgcaatgcggatgcatggccctctgatgctggaggatattaaggtaggtttctttttctttcaatcgctatactggtttttttctagatctatactggctttgctcttttttttccgccggattctctactgactgctgtagaaatccgcgaataagaacggctccctgacgaatgcgcgcattggacccgctgccagtaagcggctgtacaaagtgttcactggactcgatccgagttcaacggacatttaggtttgtttttggcctcatttggttttttggttatcatttccatttttggcttgaactactgcagagcgtagctttgcattctggacgcatccaattggggtggcggattttcttttggttaatcactccagcacggagtagttggacttctaatactctgcctcgcctcgcctctcttttggatgggaaattggatattcccctgcaaatgagatagaattccttggctatgaggctgcggatgccagttggtgcaggatgcagtgatcacttttttcttcttgatggaaatgttgtatttggacatcctcgtaatatgatagaaagtatcgaaacaataaagactgcctagctatatgcaaatgccaaacccacatctatgcatagaacccattatcaacgccaatataaacgcatatgtcaaaacatcaaggacatacacaagatcaaatcaaatgcttccatactaaacactaaacaacaacccccctcctcttccaccccctccaagcagccacccaagccagaacagcaacccacacactaaccgtgcagccagcagcccagaacccatagcatcgccatccatggcactgaccatcagcaccatcaccgtcgccgcgatccatggcattttgatatgccgcggagtagataatgccccagagcgcggcaccagccgcaggcatcatggcaacgataccccaatttgtggcgaagttctcgacgccccagacgacagagatgatgataggcgcgagggaaaaggcgctgccgtatccgaagccgatcagcgcggttgtcaggttgaagatgcctgggtgcgctaatgggagaggggaggcgaggaggaggtagcctagggagaggaggaaggctgaggggacgaggaaggtcatgcgggatagagtgaggcgcgaggatgcaggggatgtgaggggcgcgtatcgggctccttcggaaatcgaaggaaagaggtgtgttgccgggggtgcgaagaagtcggaaagtgagcctgttagaaggcgcgcgatggtcgaggttagggctatggttgtgacgtgggttgagggggatccggctgggggtgatgcgcctgtgggataggattgaggtgtgagggttgggatgattgtgcccagctattttggtcaataggttagttatgggttggagtgagattggagacgaactcacgttgttaatgtacgattcgccggggccggtgaccaagaaaaagcctgcggccagccaccacatggtcttgtcttgtaggaatacacgggtttcatagttgagcagccagttcctcttccggcgctcctcttcctcgcgctccttctctagcctttgctgctcacgttcttcatcggagaggattgattgctcctcatcagatgagtcagagaacgtgccgtactcaatcgcttgtggtcggaagaaatcactctcctctaacagtccactgcgctctagttcttcaaccgtctcatcaatatacttatcatcatcatccacgatgcgcaaggcaaaggtaccgatgatcccaatcaccagcaaaagcaccgccagaaagacaaagtatttataaacgtcgagatcgccgtgactcccatcctcgaggggttcataaaacaggtacgtcccgagctggctctgccacataccactgagaccgaacgcggcaatcggaacagcaagcataatccccttgtgctttcccctgccaaagttcttggcgcacgtcgcaatagctgctaggtacatgcagctagtccccataccaatggcgataaacgccacgatcatcacccagaatggctgaccggaaccacccgcatcagcaggtgggccacttttatatgtgaatgcagcgaggagatacccgacgccaaacaccagtcccgagaacatggccagtggcgatgggctgtagcggtcacacaagtagccgaacaaggggacgggaaggtacattgcgatctcggcagcgatggaaacggcattgacctggagctgcgagtaatggagtcgagtaaggagaagatggccatacagagagaaagcagtgatgctgccggctcccaagctgcaaaacacgaatataagagtcagcttccaggatcccaatggagatagatcgtctcgtaagcatggctgcaaggaagaagagtttcccataccaagtaacaacaccccagccaaagctgagcactcggataacctccttctgcatcctccgtctgtcccgctcgacaatctcttcgacgacatcgctcaacagcccgtcatcactcagtccgtcattaccggagctccgtgaacctcgccgtgaatatcgccatgacggctctgcgtttcggtctgttgtatcttgttctgcatcaatattttggaggagtgggcgattcgcgtcgaaatcgcgcttatcgatcgtcatagtgccttctccgcaccggttacgctaggctgtgcaaccgactctttgtctgaggggaagtgtaagatgggtggtatagataggtatggaaggcgggaggcgtttgagatagaactatatggtgttcacgatttggcctgatatgtacgctgagtacgattgtccgtgtgatagagcttcaagggtggagcggtgtctgctgggtggatcctgaggttgcgttgttcaatgctacgtcattggagttcagctttcgatcccggggagttatgttcaatgtagaattgtaggtaggtaatatatgtgatgctcaaaaggcgtagtcgtcaaggcaagctgaggaggacttcagcggagagagcggagagagttggagtcattacacgtgactcattctacaatacccgatcacgtcattgtacggagtaaaggaatacctatactgtgatatagtggaaacgaagggaaatacaccatctagagataaaaaggatattcatgtacaagtaataccataggataacaacaggcagaccgaaaaaaaggatttgaagacattggggggtattatcaatatcaataaaacagaaagaaaagaaactgatacacgcccgagaaaaaaacaagacaaaagggcttccgagaaacaaaaagaagagaagaaaaacaaggccaaagacaaaataaaaacctcaaacgactctaaatgcatccaagcgttgacggggatcatagaaacacccattgaagggccgggtcgttatttcgtagtgccgacgatcaggcgggatcaggcactggtgcatatgaatgctggcgttccgatgtggaaggatctaccctccgaacgccacgtatcggcagtgggccgagagatgataaaaacaaaagaaagcaaaaggcgaaaaaggaaaaggaaaaggagctagaaactgacttcgcccgcgtcggtttctatcatggtctcatcccaatattgagaagagggtcgctcacgagcctcgggttgagagcccagcgcgatggcttcaccttcacctcgttccacgaattcgtccagactgacctccttcataattcgctggaaatacattcggagtgtgcggaggccacgcagatatccacgatcaatgtcgtgcgggctgtgaggtgggcatggcgtatccggaggaagcttgtcctcgccagtgatgcaattagcgaaatcgacaatcttcagttgaacgttcagtttgctctggccgtctgcatggtttccattattagaacgcggcggttcttgctgaggtggagattgtggttctccgtcataaagaatcaacagactgctagcatagagccggtagctactcaactgtcgaatcatgtgctctaacaaagctaatttctccagaatgacagggatctttttggcaacactggcatagctgacaccatcgtataggaatcgagtcagcgcatcctgaaattcacgaccagacttcaaatctcgcccgaaatacttgtcttcaaacatgtactcctgcttcttgacgttccaggactgcatgccacagagccgcacacccagctgctgcgaagtagtggactgacatttccgtcgctgagacttcttcttcttctcattcgcctcgataccatattgacgggtgcccatcttcaaatccagcacgcatggtttattcataccagctgtcagatcctcaaggaggaggaagaactgcactctttcgtcctttctcagctgcgcctctttggggttgctgggcaagatcgtgttgataggctcctgtggtttgaagcgcgttggatcagaagttctaccgaaagcagcttcggttgcgtggccaccattggtcgagttattttccgacactgggaccgtggaggaaccattcgacattgaggcatcggcttccatggagaaaatcccatcctccttgtcaccgccataatcatcgtcatcgaagaacatgagttccccattgttgttagagtccatggtaccacgtctccgaaggccactcccggaatgacgccgtcttgggtggtgaacccgagagagcgagcttgctcggtcaggctcttcggtccggatcttctctagacggttttgattggcttctagggcagtcgaagccgacgatgaaagagcagagccttcactaggagtcacctttatgtcaatcgcttctgtctttagcgccgcgactgggctagggactggtcgttgattggtagctgtgcagtcttctgatagattctctcgacggtgcgtggcgcccggcatatcggaattagctcttggcaaatggacatgaccacgagcatgtcgacgatgatgatgaatggcaggagggctgaatacctcgcggagaacctgctcctgaagcttgagattgacggtcgtggcgccccagatcttggcccgcttactcataggcgatgtatcagactccgctgacatacctttcagaccgtcaacggatcgtgcgcggctcattgaagcatctgctgtccgcggtcgctgctgacgagtaaaaagatcggcaggaattatatggcgattgttctcaagaatgaccttggggatgactcctgtgacttgggactggctaacaattcgctgtggcggttgttgctttgctgactctggaggctcagagctgggcgttgaagttccattggctgtcggatctggaattattttatcggcagaatcgacctggtcctttcgtttggatgtcttcgaaaaggtgacattcaacactccgatgtacctgatcgaaatattagtatttaatatgctgataaccgtctgatcttcgtggaattgattttacatacttgggaagaaataccaacatatctgggtgcctcagttcaatgcgttcgtagaactcgttctctcggttgttcaactgcttgcatacagcgcgtctggaaaagcggaaaacagttgtgtgcccgccaacctgatgtcgatagggcttcaattccacggcaccaagaggccccgggggcgggggtttgggacgagagagaagccgagaaggctgggtgggtgtggcactcggggtttccacctcgtcagcagatgggatactttcatctgccgattggggttcgacttcggaatcgtagattgaatcgctgcattcagagatggtactcaaaggcttttctggcacattctctcgttgagaatggatatcgccataaaggatcttactttcattcttagatcgaaaggatatatccacatggctgatttcctttttgggagaatcgctacgctcttgaggtactaacatcagctcatgacctttctccgcagccgacagctgacccggctgtacatgaagagggctatcgggaaattgttgcaggccctcaaccccatcaggaaccgtacgctcgtgggggaagtaaacggcagaagaaatctgctcgttttcttcctcctcaacctgaccacgctcctcttcctcgaaagagttagacggggatacctcggcatgaagatcgctctggaagtagtcacgggcgcgctctgaatattgagtgggaatgcttcttgagaaagaagacccatggctaccaccaggcgtgagatgaaagtttcggatctcctctagcaagctgcgaggcaaggctgtagggccacgcttggaggggtcatcatcgtatgtggactgagataattcagccgggggaggttggaaagacggggcatcgccaagtgcggagagtgatgtgcttttatgaagcgacgtttcgtgctctgagcgatatgattcttgttcatgttccatgatgcgatccctcgactccaacgtctcatcttgtggtcggccgcgatcctcccgtcgtttgcgatccggtgaagaagcagtgttttctttgaaaaggcccaggtagtggctagacttacgactgcgcacgttagaggccggctccgggttggtaaaattggcctcgatcgagctgtcaactcggccacgacgacctctgctggggcttcgctcaagcaccacaggggtctgaggtttttcttctttcgcactgtaggataagggatcctgactgatctgagagccctcgtggccagaggttgggatagtcaaagagtgagaggtagagacatcatctaatgcagacgggaacaatttccgctcaggtaaagtgccttggaaccgactggtcttcgtacctgtgttatcccatggcaccttgtatcgctgggatccggccaaatgaggcggcgcacccgtctcgacctcggttttctttgagcgaccagtcggcgaggtcggtgtgcgcagcagagacaaacgagggaggtcggtggatgagaagagggtcgaggaacgcaacggagaggttctgtggacgtcaacttccatgcgggaagggtcgacgctataacgatggggagagaccttggagaatgcacttggagacacggatgcatcgtcaaggctagggatcaagttgacctggcgttcattgcccaaggccttttcgggggggagttgtggggtagtggcggcactatcagaggggaggtaatgagtagcgaagatactgtcacgttcggacagttgaggcctgtagacaatatcaggctgcgcggtgttctccggaggtgtggtagcggttctttttagagggaatattcgggagacgggctgagaccaggaatgggcggtgggggattccgcgcgcgacggtgataaaacctccccagagccccgagacaaatgagcttgcggcaaatggtgacgtgggccacccccgatgatattggagcaatcatgttgggccggtgtagcaggtgtcaccaggggactaggcaaggtatcttcgggaacggacggcgagtttgacatggggaggacattggtcaagcacaggacgggatggtatggaagcggaaaccggaatggttgggcgtaagtaaaaaaaaaggaagatttaagactaagagagaagcctagaacaaggaagaaagataggcgggttagaggaatgtctatctattggcaatcaaggggaaagagttatgggcacgttgaggcagacagagatcttacaggctaaaggaaaagccgcaaatcggtgagaaggccggaggatcaaaagagtcaaggggagttgcagggaaagggaaatttgaagtttgcgagagaccagccttgggatcgtcaccgcccttgagtggatccgatttgggccaaaattgggataaaaatgggatgaagatgatattggagattgagaaggagaggaagaggcagatcaaggcaaagaaagatgaagtcataagagaaatatatgggagtccatggcacgagacagtccaagtacagcttctatgagtacccggcctatcattgtgcaacgtcttacgaacttcctgactactgactgctagggttcccaggctagagatggagattattataatagattgaatcgagatctcgggatgatattagggatatttagaatatttagggatattcaagaatataataggtattgtacaaattaccaagtaaactcccaaggttctctattataagatctatcaacttctacaaaccaaatatttatggctatatcttttgattcctatctgccaatcatctgtctcaattcatagtgtgcagccatgtcgatcgctaataggtgattcaggggatttctgtaacttgacatctcgacatcttgacatctacaacatagtatcctaggacggagtactgcataccccgtaccttaataaatactagtccagtctggggttaagctcgtagactaaaacgaccaaggcttttcttctcaccagatggccccataagggaactaaaagaactaaagcccccccacttcgaaaagccacgcagtgaccttatctcccgcggtataaaaggtaccatagatatgtatggatttatactggattactccctattggtaacctcagcacacttgattatattcaaatggataatccaagacaggaaacacacaaattcaatccaacagcgcctaagatgtgattgtgatgagataaagtgattgggagccgagcgcgtcgtgacccaaccagagtgctcggcgatgtgaaacagatgcattaggggccacggaagagactaggatggtgtttctcaacgaaccagcttcttcgtagaagaaaaggagaggagatccccgcagacctccgacttttgtactccccgctgacaaggctcctatggtctacgactccttagtttactgtcggcctccttccaccatgcgccttctttcacacttgaggccctataggcactgggaccttataccttccatttcccatcgcatgtccttgagcacgttctcccttttcgttcatcccataagaaagccgttgagtcgtatgtcatacaaggttcttccttcaattatctaccttgcgatcaaggccaaatctactattttactcttgagaagatctccatcagagttatatctattcacttgataggaggttcccgagaaatatactgccttcaaaaatgagtcgcttgaacgtggatacaggaggaaatcacgagaggtattcgtttatggaaacaccactcgaaatgcacccttcatcgcaccaacagagtctatcagcacttcctccagcgggcgcgaatgcgcacccacagcatcctgcagtggacgaacagcagaaagagcgacagcgagcatggtcttatgtaccgagtgagaaagaacaatttcagcatcaggggataatcccggactatgccaaccgtccgcccctcgagcagcacccggccaattatgcgcctttggttcaaaaccaggaacagcagcagcaacatagcacttcaatatctcctcagacgtccacaatcgcgcccgagcagcaacaacaccatacccaatcctataccagccagtcttatacaaacgtagccgaacagccgagtcacacggtgtctccccagacatatgcgagtcagtcgtatacaaatacaccagagcaacagcagcatcaatggcaccaacagattggcatgaccatatctcctcagtatgcgaacatacccgaacgacagcagaacagcaccccgatgtctccccactcatatgcgagtcatccatatgcgacgcagtcataccacatcccgaatcaacatcgcgacatcgaaataccctcccagcaatatgcctcgtataccgaaacccccagctcgccacccccgaactcaccagggccactgcccctgaaagtaaaccccgaaggtccaccacgaagcgaaagcgtgcccattgttcccgacgagaatcccctgcagtcacccatatcgccctattttcctccgattactagaccgaaaacatcgcatgctccccagccggatgatctgagctcataccaccagcccggccaaacaacccatccaaaccaggagataaagggcggaggatggagcaacagactgtgcgaattttcgaatttcggaatctgctgtctaggactgctatgtccgtgcattttgtacgggagaacgcaacaccgactctcgatgaaatcgagaaaggaagacccgaccaacatgctcggctatgagacctgcaacgggtcgtgcacggcgatgggactactatgcggatgtcaatgtaagtcgaagtccaatttcaacctcagttttaagcttgagtgaatatcgcgaccgagcaaccgagaaagaaaaaagcaccattctgacaccagcacaacagggttactggccacggtccaacacactagaacgagaaaggcatatggcatccagggtagtatcgcatcggactgcgtgagggcaacctgctgtacatgctgcacattgattcaggacgagaaggagatccagaagcgcgaggagtatcgctcccgagcggctagggaacgggggacgactctgctctcgccgtatactactcccgggccaatgtcgtatggcccgccacggagataatgcgccatggttagtgaagagcggtttcgatggcgtggagtgtctctatgtatatagtttatgcattgtgatgtaatagcgtttattatttgatgtatgtttttatttactcgtagggacagaggaatccgtagcctgtcagcattgccaatctaccgacaagaattcaagattgaagctggcagttacgtatgaaatctactgctctcatcaattttgcagataattgcatgcggttggtgagatgtgattcatcatattgccacctacgttggaaacagggcatggtgagggttgagatcaggttaggcacaagcagagaaccaaacaggagaaatcgattaaatctggtagaatcaacgagaaaatgcatatcttcatctctaagcatttactagcttaacaaccaacgtgtaatcctatggccataggtatccactcaagctctatagtttgaaagccaataattgaaccctttcgcgacttttactagacatatgtccatagacgagtacgaaccactaaaccctcaataagagtactcaagggtctcgcccaccacttatcaatcccagaccgggcattcgagccatggcagcaggccaccctccaaggtatggaaggtagcaattcagttcgcaatttaaggtagagtacagagtactaccgacacctagtcgcccctgggatgtatcatatcaataaactcaagagaggtcgtgcgatcccacgatcggacaaaccaaactggcgggtcgacaccgatctcaccggggcgatgggtcgatgcgccacgatgatccactaagtggctcacccattccctctgaagagtctacggagtcccttatgtgtatccgcactgcaacctcggctgtcaagctagccatggtaatatgcaaggcgatgcattgaaggggcgcatggatcgtagatatcttcacgtcaaagctgatgtatcaattggtaacgggggatctcttcctcggaaaaggttgatactagtcgtcaaagcccttgttgttccctgagtaggttttgactagttgcactgacgttggtcggctaatatgtaagggtgggatatatatcagctactactgtgggagagcagccattccttaaggttatatccaaggtgagacctgttcatttgttcgcttctgtgtatatagttgatctaggattcctgcgtcacgctgatatcggtgcttccactcatttggagagtcactctctatacttggtgatacgtgcaatatggcggattcagtggcccagaccatccatggctatgaccatgataacttgcgccatgtggttgtcacctcgacttgctttgccttcatcttgtctactaccgcagttggattccgcatcatctctcggaagatcaacggcagcggtctttttgcggatgactggctcattatcattgcgttggtgagaagcacgccttgattgtttacgacaaggctaacttgcaaacagatcttcgaatacggtatatcgatagcaggagttgtttgtacgtcgaatatcattcacctaaaacagccaggagctaacgcacggcagtactctacaatggactcggaacccatatcgtcgagatctcccccgaacagctcgttatctacttgaaggtatggaattgcatccgattcgctatgaaacgcatgcgtgtactaatagactcacagacactgtttacaggctcgatcctctataccggctgcattgcaagcatcaaactatccatcctgatgctttaccgaagactgttccctgtcaagagcatgaagtacgccgtcagtattgtatctctgattgtgattctgtgggctgcctgcggtattctcgcgggctgcttcatttgcatcccaaccgagaagctgtggcatcccatgctaccaggtggttgcatgaatctgtcaaaattctactacggtcttcaagtccccaacatcgcaacggacgcaatcatcctcctgatgccgatgcacattgtgtggaaccttcccatctccaaagttcagaagcttggtctttccggtatttttattctgggagtcttgtaagattgtactgtctctattcgaagtgctcttctaattaatgcaggactttaatattcgacatcattcgtctggttgtcctgattcagctttccacccagggtgaagacattacctgtacgtggaattattccctaacccatatatgagggctcctcactgatataaaaatagataaccaagtcccagcaagcgtgtggacttgcatcgagcccgctgtcggaatagttgccgcctgtctgtcaaatatgcggcctttgttcaaggtcattcataccaaagtctggtctaggctttccagccgatacgccacccacacgaacaatcccagtgattcacagattaacgagaagggtgtttggccgcgacagacacctagcccgagtaattctcccagtcccagtggtgatttcgaccagtcgcctactcataatcagtctgctgtgtaagatatgatcgggactacatctatatggatcggattttttttgcctttttacgaaggggggaggtaccgtctcattcattcctttttgtcttttgtctttttacctacaacgagaaagccaggatcgatttgttagcaattttctagatctttaagaggaatcgaacataagaattcaaacagagctattgtcttttgtccctattaagtaattttcagccaatcgacaaagtcattgactcagtgcaactagcagtaccggagacatgaaagagtggaataaccacccgaggagaaatgacaacgaaacaaaggcttttatagcctttggtacctttatttctccacagaaaggagttcaatgcttagctagctgaacatcagccgaaaatttcataaatagctcccattgcagcaatttccctaacattcaaccctctaagaataagttccgcactctaattttctttcagtccagctgatttatcattgataagaagacctaggtaagttccaattcccgaccctgcttagctccgagtttctaaaagatgtataactatgagccagcacgctcgcagtggcaaaaaagcttccaaatggagtgccgcatttttgtgaaacaggcagaggctctagctaattacaccagaaaacatccggaaaattatgattatgagcaaaactgcaatgtccatagagggcttatcagactgtggtctcaaatagcgcgagtgaaagacactaggcttgatatggttgcggaaaccccgagatgtcctctcgttctgaagcaacgcagctattggttcatacgggatcttgcagaccagaccgagtttgaagacgattgcaataagatagaggcccgtctggaggcaatggcggtaaaggtccaaacccgcgagttagagaacctttggattgctggagtccttaagtcgacggctttgcatattcaggacaaattccatatatagattatatatcttgttggaattggtgtgtaaatttgtatggattcagcataaattcgagccttcattgttacatcacatagagtttttatttcagccttaatatataagcccgatagcatctttcattgtgacatcaactcaacactatattcgtcgctagtacatctatggcctcatcctcaaattgcctcctatgcggagtgcagcttttgaggattactgacttccaacagataaattcactccgtcacattgatttggtacaagaaaaacaatagaagcaccataagaaggccaagcttaaacatgtaatggtcccatcaaaggaggtagaggaggcagaatttgagaagtatcccaacatatggacatgcatgtgtcgagccagtgagttttatatagtcgcgccctagacccagtttaccctaacagacacagttatcaaagagcccgatagcaaatactttctaagcggtatcactgcacttgaagaaggataccctaatcccgggattattccaaaaaaccccggcatggcacgaattggtgggagaagacttgaaaacccccgatacgacgacaccttcattcgattccatccagcaatactcgaaagacaaccgagagagtacaaacgcaaaaatgtcggattcgttgtccatgcccactgctgggttcttcttaaccacatcataccaacgacactgatcgagagcaaaatggagaaattcgttcgcgctgcccgacaatactggcgtagccgcgaatcgtggggagctaatgattatccgttcaggatattgaaacgtaggcagacgagacttaggattcggtcgggatattggcagtggaaggattgggatccaaaggactccaaatatgcctgtgatatttacaggagtcctctcatagtgcccgaagttcaaagagcaattgaaagcgcaaggaagaccaagaaggaacgtgtgcaatcccgttacagtgacgtgccattggaagttgcgattatgattgccgagctcatctgccctgttgactatacaccggctgatttgaagaacacacggaatatgctttctgtattgcagtggacattgcctgattggttttggaagaggcggttaaaagaggagatcttcattgagttgaactcactcaggggggccaactgttcaatcgattggcagggcctacggcttgatttgatgggtcttgtttttgataaaaactggtatgttttcagcggtttgccgaatcgtgagcgggtgcttggctttatgacgggtatcaagtcgaattttctcgaaaagtgttgagggtggaatgaattaggaggacttgctatattagtgatgtgaaatgaatcgccggttaggtataacggactgtgatggctctttatgaatgttaatactgctatctcttgctacgcttgtatttgtagaggcgctaatgatgggaaaggtactcagtacttatcacaaggtggagttatccgcagattgccacgtaccgggtactttatactaacatcgccattttgaaggtcaggcaatgccgcaatgccttacgcccaagcgaagatgcctattgcccacgccataattacagacgtgaacggttaacatcaaatatgtgcggagtatgtcctacacgtagcaggcgctaagacagcatccccgcccacatgtgtggacgtcaaagctccgatactcggtccaacgcttatccaaaccccgaagtgggaattgggctgcacggtctaatgccaaatgtactttttgtataggatgcagcccaactcccgacaaggttgggccgtgcgttaagccgaatagaggcgtctgcgggttcttaagaggcgttttctcctttgttttttttttttgcctgaatatgctcccttgagattgacgaccttcacgtacacccaacatgcgcggtctcgacgatagcactgatgtatttatacgcactggccaaaaggcccagaaacatgtgcggcttgcttgggagggcttcatcaattttgcggcacgggataacgttctcgaggttgcgttgggtttgatgtgagctctccctatcgcataaaactaacaatcaaaatgctaacatctcaaaagtatagccaatgcgttcactaaagtcgtcacatctttcgtcacagacataattctgccgattgtctctctactgccattcctgaaccgaaacatggatcagaaattcgccgttctctccaagggtccgacttacgaccagcagaatgggtataataccctatatcaagcgagagaagatggtgcactggttctggcttatgggtatgtggacccacctcagatactcatggaaggtctctcccatcgatcagttttatctcacatttatgcagactgtttgccgagacagttctcaacttcctgggtgtcagtcttactctatacgcggtcggaaatatgtacatgatgatctttcccgacaagatcatcaagcctactgtccggtgtccatactgcaggcagtatatcagtaaacaggtaagtggtctgatcgggtgtgagttttacctcggctaatcgttgattgtccaaaggcgcttcgctgtcgccattgctcaacatggcaagacggaagggaagacgagcctcggagtgataaaagctctcgcgaggaactggctggtgccgagccgagtcgtgctgggcaaatttcctaggttgtactagatgacggtggatttgtgaggtactgttaccctcatgtgcgcccacgtgagggtaacaggtacagacagtttcccgttgcaatttttgtgcagttgtttagcgagtccgattatgcacgagtagatgatgtgatttgatttattgttgttattgatcgagggccgtgaaaacctcggaaagaccgttggatttgatgaattgagatgtgaattgaatgtacaagaagctgtataatacagacaccagaatgccagatctagatttctatacctctatatcgaccaccattcgaattcagtcatatcctgtaccggcaaagtatgttgcttgcggcgccacgtcctgcgggcatgcttgatgaacgcgtcgggaggagaccaggctgcctcccaggtctgagggtgtcgcagagtggttttagattggagaataccaaagcggaaatcaaggggattgaaagtccctggaggagacggcagtcgcatgtagtagcggacgctgtcgggaatctcatcggccacatggctagtcatgatcaaggcttgatcctccgtgagaccagtgaaccggaattccgactccttcgaggagcgggcttgaacattaagtgcacggcgtttaggtctctcgccattttctaagaaatgcaagcacgcgttacgctgtgctgcagataggcccgagaaagcttcgtcgagaataacaatgtccggcttggcgacgatggcccggaggaaaagcacaatgcgttgttgtgcggtggtgagctcactgaagagaatttcatctgcgtatccaacaatgtgatccattaacgcgtatgtacctagcttgacgtgagtccgcttcgtgagtgacgggagaccggcagtcgatatttttggtacctcgcccggggcgtaatttggatccagatagggctggaagaattgcaggactgcggatatatcttgatcgcgttgaatgttcagcttcggctttgacaggaaggtctcggcgaaggcactctcaagtgctgcacggattgataattgacgcgggaagaacgcatggatctccggtgatgaatgtccaatgcgggactgcagttcgaagattgaaattcctggtttgccaggctccggaagcctggatcgtccgaaaagtttgacaggctgtgcatacgcttgcggatggtcggatgtgaccattgatagcaatgttgtcttgcctgacccgttgggaccaaggatcgcccagcgttgcccccgacgtactcgccaatgcagcccatcctttgcttcgccatttacgttctgttgccaattaccgagtactaccttatccccgtacttgacatgaactccttccatatcaatgactggctctccgcccaagggtgcatggacttctgtggactttatctcattcgtatgcgccactaaatccccaaggagttctttgtccaaaacaccagccttcaagtctgctgtacatttctccaatatttccgcttgctggtcgggtaaagagtccggcttagatttatttgcgacgtagctccagacattgagcgtgtcttcgatagctggctttggcccttgcaggagaaccttatggtcattgcccaaaaccataatgtgtgtgatccagtccggcaccttgtcctgggggcgcagagctagaatgagccgcggggcgctcttcttcgctaattcatgaagaaggttagagatcttcctcactgccaccgggtccaatcccactaagtagaggttagaatatcacagccatcgaatgtgaatcagaaacacttactgaatggctcgtcaagaagcaatagctctggtttgcttagaatagcctttgcaattcgcgctcgacgagtttgaccattgcttagactcgagactggcaagaggagaagatttcctagctcaagactttcaatagtccgctggagagagagttcatcgtgtagcgtgccattttcatcgccctccatcggattcaaggaggtctgcccacgcaaatattgcagcacggtccagtcggtttcctcccggtgactctcatagcgagcactgagatatgcgccacggactcctccaatggcccccgagccctcgccgctgaaaccaacatattggaccgcattttcaatcacgcgtagccgtgggtctttttcggcgatctcgtctgtgaggaggtacggatatgaacgtgccttgggcgggatacagatgtgttggccgcggaggatatgcaggaggtcggttcgaccggctggaccgattatagcccagtgttgcggaggtgcctccttggttgcaccgttaacataaatagcgggcagagtgaagttcaggtttgggaaaagaggtggattggacgtgtcttcggaggttgggtatttcttgtaaaaggttccatcttcaatacgaaggaatgggatttcagacttgaaacgggtcgggcggtaagccgtgagccgcaatgccctcggtcgcaatttcgttcggagtagcattgtcgccatcaacttcctggaaacgtcgcaaaagtgcggagattggagattggagattcggggttaacatttacaggtcacgtgacctcaagctgattcggccgtacctgagcctcaaacagatccatgattcgctacaatacagttacatggtagagatcacgaaggctgtatatttgcaatggctaataatcgaactaggacatgatatcaggacttgtcccattatatcatgtgaccatttcaatgtccacttttctgcctcatccgaagcagtcaagtaacatcaacaaccaagtcgtagataactaatctgaatctgatattgatcatctctaagcacatggaatattctctcggagattgaaacgcctgaatacctcacgtgactgttccgatctgatcgcatccgatcccggggccggatagccgtctgtttcggatctgcatcgtgcgggnnnnnnnnnnnnnnnnnnnnnnnnnnnnnnnnnnnnnnnnnnnnnnnnnnnnnnnnnnnnnnnnnnnnnnnnnnnnnnnnnnnnnnnnnnnnnnnnnnnnnnnnnnnnnnnnnnnnnnnnnnnnnnnnnnnnnnnnnnnnnnnnnnnnnnnnnnnnnnnnnnnnnnnnnnnnnnnnnnnnnggggggggaggggggagggggttgcatagcttgacatttcgacgtgtcttatatctgctgtctttgggacaatccgaagctcaagcagtggacagaaatacttggaataaaagcaacatatatctattatcatcgccggcaagtcgtagtacttgaatcctaatataaatgtaagccgacggctaatggggcgggtgtggccacccgacggccaaactctcgggacccgattatcagaggtcgtcatggaccttcccaagcttatatagcctgctcttatttcatttccccacaaagcttccgcgcatctgtgctttccacctaaatctcacgtggcaaccacgacgcgttcatccgatatcaaatcgctgtgaatctccattcgaccaacatccaagtgcaagtatctacgcagagagaaagaagcaacatgccacccagcgcgtactccccggtccttgagaccagtcgcatcttctctgcgctgtgtgaccagtcggaacgcttcgacttaccacccgaggttcttgcgaacaaagaccgcgtttcgttctctaccagtcataatgaaatctacttcccaattccctttaaagagaccgagactctcgctgccctgaagggtatcgaaggttccgtggctgcggccattgccgacctgcgcttcggtgctggtgaggaacctcggggcattcaagtcaacctcgaagctgccactgcctttggatgccaagcgtacatggcaaaggttgatggtctgtcaaaattggacccagctgtgaaaacaaagctgaagagtatgtatttctgtagagactgatatatgggatgacaaaacaatattgactgtaacagacacggatttgctggctgcccaatccaacggctaccgacgtatgtcggcgaatctttacaagactaagaacccaggcgaatacttccatatccatggctctctggaggctacaaccaccttgaacatgattgggctcgagggccaacgaccagacctgactgattatgaagaaatcatcaaggtcatcgagagcaaagtacagcaatacacagctgcggagcttgaagatatgaacaaagagaaacgccaggccggtgtgactgcttacaaacatgaggactttatcaagactccccatgtaagtgttgcatgctgtatccgaccgcaacaagcaagctgatcattcgacagggaaaacttaatgtccaagagcctgcatggaaagtcagcaaattgcctggtgatcttcctccaactcctttcccagctagacgcaacggcagcaagaagatcctcgagggcatcaaagtactggagctctgccgtatcatcgcaggcccgactattacccgcattctagccgaatatggtgccgatgttttgaagataaccagcccaaacctttccgatgtgccgtttttccaagtcgatggtaacatgggcaagattgcagcagatcttgatttgaagagcgaggctggacgaaaggagtttgagaagctcctggatgacgtggatgtcatcgtagacggctaccgtcccggagcactagataagcttggctacggagcagaggccatggctgcgttggccaagaagcgcggcaaaggcattgtttacgtgaatgagaactgcttcggatacgagggcgagtgggctggccgcgctggatggcagcagatcgcagattgcgtaagttatcacatactgtctctactgtccagatcaaaactgacctcggctacaggtgactggaatcgcctgggcccaaggccagttcatgggcctctcaacacccgttgtacctccttaccccatctccgactacggcacaggctgcatgggcgccatcgccgcgctgactggtctctatcaccgcgcgaagaccggtggctcctaccacggcaaagcttcgctcatgcactacgaccttctcctctttgcaatgggccaataccccgctgatgtgcaggaggagcttcgtaaggtgcaaccgcctgagttcttcaagttgcgtcactgcgacagtgttgaccgcatctcgtcgaccgtgctgaagggcatgcaggagcgattcccgcacttgtacaagcctgccggttctgagtcggaaggtcgcaagccattgacagagttatggacatcgcgcgcatatggtgcggatatcgagattgtgaagccagtggtagtaattggcggggtggataatcagtttgtgcggtctagtcgtccgaacggatttgaccgagcttcatgggaggagtttagcgtcaaggagacagatgtgaagaaatgctagtcgtttccgcactgttttccttttcttttttagcctttgaatacgggatatgcacttcctgtacgtagatcgcaattgaacaccatctgcaaattacctcgagaaaccagaatctctgacaggaggctcggtctgacccaatcgaagaaattaggcttatatgcgacatagatccccgcatgattcatcattattaatttaaatagcttcacaggctggttggaaattgcggccaacggtagacatacccaaagtagttagtcgagagtgtgtcaaaaaagcaaacctcactaacaaacggtgctagaccagccggtctcgcaatgcgttgcgcctacataagcacaacaatcccacctgcctggcgtatgagctgcgccgagctgacgactctcagcggcacagctgtaatcattctgaatggcctgtggctggtcgattgtcttggtgtgtatgacgacctccgagactgtggatttgatggtgtacagatgacgctgcatttgttggctgagagtcttaagaggtgggattgcgtgggctagggagaggattggtcatatgaatccttgcatggcgaataaggataaggttatgtgggttgtgttgtatacgagtgtttctagggctttggttttagataaatagggaattagacagcggcatttggtttatggtattgatgaggggaactatgaatgtgaatatgtgctgttagtcaaggatgaggtacaatcgagctgttcattttcttgctcttgggcgtatgctatagtatcacgattcacgacatggctaacgctgatcgcgaatctttagacagcctccgggaaattgtcggaggtgaaatttgtatattcacaggagagggtatccgttataatgtgggttcgataagcttcttcagcttacgaagagagagaggtttgatcaagtactcgtcgacacctgcgatcactgccgcctgttgcatggtagctgaagcgactcctgtgacagccatgatgcgagagggttggagaccgtgatctttttcgtgttgtcggatcttactggttgaaaccagaccatccattataggcattgataagtctagaattagcaaccacccagttagtattttcgggatgagggaggggtgtttagcagagtagtagacgaacccatcaatatcaaatcgtatcttcgacttgaactttcaacaagttccaatgcaatcagtccattagaagctgtgtcgtaactacatccaagttttcgcatgagcgtagccaatatctggttgtaagtcagacacaaggaattaatggaggcaaccgatatacagaaaagaaagggtaaattctgcgtaatcgagtttgcagtgagataacatacccggagattgatgtcattgtcatctacaattagaacatgcatatcgttcggttgatcgttcgatcttatcggagagcctccgataggactactctgacagaccagttcaactggaggctgttgtggaagaccttccggtatttctggtagggtcgacggggtaggttctgacagaagaatttcatgggtttttggtggaacggtaattggaggttcagggccgcgtatttgaggttgtaaattgtgcagatgcactattttttgagctgtttcatagattttctgaggtccgtatctgcatcaaaagttagctcagtaccgcaaaagggggtagcttctggacgtacggctgtgacatcaggatagcattcggagcaagagagtagcttagtgatgatgtcgtgctgcccaagacaatgaagaatttgaagtcatggccggtattcatggtcgagggtgattggtcattcaacctagcgttgaactttgcctcctcgataaccgcgatatcaccctctcccttctcgagtgactctgctagtgcgacatgccatcccagttgtacccccaaaacattggcgagagtactctgaatagaaagctttcgtttcgcatcggagctcagaatgccagtgggctcctccgtcaagtcaggacagccactgaacccaatgaggcatgccttcatagtgtccttgtgtctttgcacctccggagaggaagcatcgtcgaatggcttggtagggagaaggttcctcggacgccgtacggggatgtaaacatcgacctgggtaccaacaccggtttcgctcttcactttgaggtgaccacccagaaaggtcactagcttacgcacgacgctgagtccaagcccgacgccttctgatagagcgtcttcctgggcgaatggagagaacgcggagtttctgagaaagtcctgtgaaattccttggcccgtgtctgtgacacggaggtggacaatgtgaggttctgcttgagtttgagttgcggtttgtgacaatgatacctcgacgaggccggtctgtgtccatttcattgcgttaccgaggaggttcatgactattctcctccaggcaccagcgactgattggataatccaggacctggactgctcgatgtttactaccactgacaattcatcggtaccttgagtaatatgagaggcggattgcgaggacgaggtagcagtagctatttcactcgcaagagacgacacaggcgcgggtgcctttcggctggtatggagtataacagcgacttcttcaaccaaggaaccgagattgaagtcggaaactaagcttgttccagaatcctcagtgttggtcacgctgagactttgcgtggttgccaagttgttgattttacagtaatccagccttgtattcgtcagtaaaaggcctcgcccgatggactgcgagtgaaacctacaggtgatctattgtgtccagcaaggtcagtcccgatgttgagatcatgttaaccatatcacggtgcgcagtctgaagcggaatatcatgtagcaactctgcgctcgcgaggatgccatgtagtggggagcgaagctcgtgactaatagaagttacaaagtcaaatttcgagttctcactggcggtccagtgtatccgggatacttcagagatcatagaatctccaaaagccttaaagtagtgtaggtcttctatgcctaaaggacgatgacttccgtttacccatgctagtgtacctgcgagccatcgcgatttgttccaatcccatagaggatagaaaagcacactcttggctccagggagctgatgagctagacgatgggaaatctgctcaaagttctcaaaattgggatcggaagtctctggatttccacatacagaatcaatggggctggccggattgctcctgctgtctatgttgaatatgtggccatctgggaagtgtgtaatcaacgaatgcagcaactcttcagtcaatgtgaccgggcgtttggactcaaggttgctcttagttggtttgcagcttatagcctgacccaaagagccacaatatttttctggatctttgggcggatttggattaggaagatcccaagggctagtaggcgcggtgggggcatctgtcgcaaactccggcaaggcatcccaatcatcatgccgtccagaaaattcgctaaaatagagttagaaactgtcaatgacccaaagaaagagtgactaacaattgcgggtcatttcggtgggcatcaagaaagaccacggcgtccagatccaaagactctttcagtaggagactggcacgggcaaaaatcgcagctatgcgttcagtgatagacacattggctggcgctaatgattccgggggtccttccacggaagatgatagcggttcgtctcggtccgaggttcgagaaagcgatgatggctgtgtatagtttgacacggaaggcatattttgagaaaagatcgacgcttcttttccattgaggctggtagacgaaccttgatcaagcggtgaatagacactaatatccttttccgtaggcaaagaaacgatcgttccacccacatcgcttcgggtggttattgaccccagatcttcagaattcagtttcttcgcagatgcttcaatctgaccttgagtggaagagccagtagggtcaaatttcgaatgacttttgacgaagtttgtcaatcctttgaccaagttctccgaacgacgatgatattgaacgatccgcgcattttcaaggtggtttgagattgagtcggcaatctcccgaagagcagccacatcctcgtctccaaatttcgttcgaggcttgttgtccactacacaatatgaacctagtacgaacccggaagggctgtacaatggcacctcggcgtagaaccgaaagaacggccagccaaggacatacgggcgatctttgtagaaatcctccttggtgaaatcgcggatgatgttgcgtgtctggttggccgttatattctccgtgtctagtatctgggaagtatcttgtccagtgaaaagtcgaatggcgtggggacacactccccattgcaagtccagtgtattgacacccaggaatataccatcatccgcgcgatgaagatttttgtttcgaagagagatcgacgcggttgcctctgaaatgacatgctgattttctccgtcgatgattgaaacaaaagaccgattgcatccaaagcgatagacacccagttgtgtcaatgcagtcagggtggtatcatttgaaaggcgaggggatgttaagtcctgtgagatgtcatgttgatccgggtctgcgcttgtagagactggctgatcaaaagtacaataatacctatagaggttgaggaaacgttagtagagatcgcaatcgggcggggaatcacaaactttgataaatcccggattctctcttgctcgacatcatttcctggctgacccattgcagatgggccagctgatctatagctggtcacttcgacataagactgaagttaggaagttctcatggcacatatgttgtcggaataagaaaagaaaacgggtttacgaaacctgttttagggaaatccctacgctatgtctgtggtggggcttaggcctctcggtaagagatatttatgggggcttgggctagaatattccattataactgtattgattgaggctatattcattctagggacatctacatacaggtatctaggtatactaggtactcaagtgtattcaaatgtatacgcagaagctgaagtggcgtactggggtgatatattgtaccagtgacattccactagagtacccgtgatatctccaccgtggtgttcgacatatcaccattaagctatttagatgaataagaataacggtgtttttcctcgttttactcttttcatttgtctttttgcatcctctttttataggtatcgcctctccattcataatttttctagatggcaaaaatagccgacccaatctatgaaaccttggagacaaccttcgatgattaatgactccaccactaatagagataatctgatttgaaaaacatcattgaaattcgagatggtagagagtatctaattaatcaaatgcgaccggtatttgatactagttgtagcttaataggtcatattataggtgtaaatttacacaggctggttgaaattgcggccagcggtagacatacatacccgaagtagtttagcgtggagtgtgtagcttttctttttatgtggcgaatcatcttccaaggtttatggcaatgcgtcccatccaatcagcttcgagatacgctgatttgcatagttggctaggttggctagatttcctacaggaactggatatggccaggcatgtgctggtttgggccgtgctgaccttgcatagttcggacatgtggtggctttgtgtaaccgttagaggttgagtttctttttagttcttgggataattggaattgcaattaggatttggatgcgggtttgggtatcgggtatttgattccatatatatatccggcctcttgtacttcataaagtatgtccggaaatatatacccccgcagaggtggaaatacaagacagttatactgagggatttgtctctatgcgagaatatgcatgagatacaacccagactagatcaacttgaagcacgaaaatagactaaaccagacaaatctaactgcttgatgtcagcatgtccccactatgggtggagaaggtcagtatgtatttggaattgtacggctatcacgcacatcagtgttttctttcataggggtaaatcttgccatagttgcttcctataggttgcttaaggagaaactgctgagcgggtaccagcaggttcatagcgtgcgattccaaattcccccagaagcgccgacatatgtacacaaacagggtccccctgaataaagctttcaattcaacatcccttcgaaagtatcaaaaaagaaacaaaaaaggatctcgctaataaacgccacgagccggagaggatatatcgcaagatgctcaaaagatacaagctcctagatgagaagcaaaaacacacacaccacaaacaaaaaggggccaaagagaagaaaacaagaaacggaaattaggtatgtacagtccgaagacagacaagcataataccaatcaggaatcaaaaatcgggccaaatgccggggttcctcgacattcaagctcatagacaattcgcgccgtcagcacagggttactgatcacgcacaccgcttcagcctggaagtccttgatctgctgcaggatgatgggaaccatgtccatacggccacacttattggtgtctaggatgataggggctgaatccattttgtggactagatgcatgatcctatcgccgtaggtcttctgaggagcacgagtttgccaaagcacacgcagtgcgggtcggttgtcatcaccgaggaatgacagacagggtccgatgcccgatccggtagtgacaactatcactctccggaaaacacgcatggcatatgcaaagccatagatcaacactccgcgcttccagaggtgagtaggcgggttctgaattgtttctgcagtccaatcaccagctttggacaccaacgaagagaagcttgggttgccgtggacgcctgcgggtgtggggtctgggaaagtggcaaacccatgccaatcccgaagcgggtgcttggctagttggatgccctttccaaaggtggtaatagcatggtcgaaatgcaagcgggtggcgtgagtcgagagtggctcggcccgcactgcgaccttccgaaggaacagccaaggctggataatggctgctacagtgagcatcaagaaccagaatgctggcagctcgatgatgaatgttccaagtggttggcccgtggactggctagcgtttcgagagaagacgatcagcagggcgacaaacaaggccacgaccagccaccccgaaaaacggtgagtgagttcgaaataatcatgccgtttcattcggaatgcggggtgggacaccacgatgatcgccagcaacaggaccaatatgacataagctaacgcaaccggtgctgctgaaataccaatgtccgaaccatcagctgatggcttccagtactggtgggacatcacgcccacgaatcccacgtaccacacgagggcagcgactccacagccgctatggacaccgccatagtggtagacttttgcggcgatccgacggaggagaagcggcgctgagcgcggcatcgaacatacgatgacgaatatagcattgaccaccagtggctggcgggccaggccacaggcaagcaaattggcggctgtggcattgaccaaggccaggagtttctgttcagtgctcatgatatacacaaacattgcaacgtttgcgcagaacactagcgtgaacagacgccggtatagtgtgaggatggcatatcgggtagatgcaaataacttgggtttgcgctgggtctgtgcctccacatcgatctcctttgcgatatcgaagtgtacggattcggctcccttggaagagcacttttcatcgattttgtattcattgatgagagtcgcctcgctcacagtcggtgtgtgtcgtgcaacgaccacctttggaggcatagtgatgggggttttctctgacataactatgatgggttcccgaggtatcacactggctcatataaaaagttcaaaagatgactggaagttgtgatgaactaatcaagccagggattccttgaagtgaaagagactgaaagaaatagttgacaacccaaccagggcgagtcctccattttgaagtgaatcacttcaaccaagacctttgttttttctcctctctctaccaatatccaccaagatcagcctcacaccccttctgcatggcgactttcacgtccttctttcccaatcgagtttgtctttccattttgggcgtcaccaggcatcaccgcgaacggtaacaccctttcgcatctgttcgggtctattcggccatcaatcgttctctcttttgagtttggctctgaaaatgaggcattcattgcatatgatcccattatttggccattttttccccattcggttgttgttcccctctcggtgtatgacactatcacctcggggtccaggattcacactattgcaagtctttgttgccaatcagcatcaaagaaccatcctactcccttgctttcagcttcacacacacctcgggaaagtgtctgacgcaatacctgaaagactccacgcagcctgtcagaaccttgtccgatcctccatcaagagggggtggatctccctttcggggatgaaccggaaagggagatcaaataatgcgctcattgaggtgcgatgcaacctaattcccagtcgatatctccacaataaccaaaccgaggaccagtcaaggcgagatgcgcccaaacaccgtcacggaccaagtgcaaccggaccagggtcgacttcactagtcctgatgggatgcaagcgctggacatgatggccagtgcacctgatcatacggtcaagaaagccttcaataaaagagacgatctgcagcatagggatagcgttgactagccacaattcctttgtaccgcggcatcaacaaggcgaatgtggatctatagaggtgtggctgaatcgtgccatgagttaatgcaataacccgtcggatgataaggcagttcatgtttttttgtttttttgttttttttgctttttattttttttggcgatttttgttttcaacgctacgtctgcgcggtcgatcatgatgcagctgagggtgttcggctaggtgccatgaccacccctccgttatctgactcgcacggcggagttgtatgctgatccttacccaacgccgaggtactggcagcgatgcacgggtgcagtacataacctagatgggtgtggagcacggtttcgttagccgatatttcgctagtcgatctggatctggaatccgggaaagaaaccgtcctcagattcaaagtccatgaccccacagccaaggcaacaatataccgacggtctccactgaatatcagctgcaggccttgggcatccattgcaatattgggcccataacaacgggtgggagtggaaggagagtgcatcccttcacgggacgtcagcgatgaatgacaggagcggggaacggaccacgcctctgatgtggcagcaggggttagattagcctgaagaatattcaaggggaatcgaaccggcggaacagcgggatgtagcacacccctgcctaagctcgtgggcgacctgaagaaacagtttagatggccctaagaagggaatgtgagttcatcggattagagtttggagcatatctcacgatccggtcgatctctatgaacacatttccaaactatatctcacgcaaggcaagggaaaccgtcagtcaacatggggacacggacgaaagggtgatctgatggtgtggctcagctcccaagggctagcgaattagtgacaagcaaatttaattattttcgatctatttattggattttgaacccgccacaccggatggcgctaagcacgcctggtggagacacgatatagtacaccgtaccctatgtactccatagtgttgtgatccgattttgcgatgacatagtgtgattggctttacacttttgattccttgctctggaggttcagctttttcagctccttgtttttgaggtctgatttacgtctatctcgtatagtaaagagttcaccttacagttgacgcagtggagactaaacctcattacataagccatgtattccaaatcctggaacaaggtggaacaggccggggggcagaggagatgtcaaggtaaattcaaatcaaagagaaagcaaaatggaaaatatacatttacctatataacccccagggatttccatctggattcattatatactacacctcttatattacttctaatcctaccaaaatgggttacacatctatggctttgaacaatatgccctcccaggtctactcggacttgctgagtttcactttcgatggtccaaagccatacaaccagaaccaaccgctgtttattgatgccgaggatccgtcccggtcatttacagcggcccaattccgacaactagtccggaccttgatcgctgggttgaaagcccacaatgtccagccaggggactgtgtattagtacacctgggaaacagcgtaagtgaaagaagcacaaagaaaagaacatccttgaagtcggaagttcaatattggactgaagattctcggaaaataaaagaagcaatgctgactcgggcctgtcatatgcagatactgtatcccgcactcttcttcggtatcattggcgccggtggtgtctatatgggatcaaacccccggagccacccccaagaactcgatcatatcctcagtctcgctgagcccaaactgatcctcacaacccgcgatgccctcccctccatcctcgacgtctccgcggcccgtggcatccatccagcgcaggtctgcctcgtcgatgaccgagccatcgaccactgcgcacaactattcctgtggtccgaactaggatattcaccagcaggacagttctgcgccatgagtggcgacgcgcgtcacaacagcttcgcgaatttactctgcttcggcgaaagcgactggttgaaattcgccgaccctatcgtcgcacaagccacgcctgcagccatgtacccgaccagcgggacaggcggactgcccaaagcagccatcttgtcccactatgcgcttgtctcacagcaccgctccatttactatgaagtgccacacccagttagccggctgatctcgctgcccatgttccatttgtttggcgcactctggacacatatcttccctgtccgctacggacaccccctatttgtcctgccacgcttcgagatcaatgaattcctggctgctgtccacaagtaccagatctctgagacttaccttgtcccggctatcattcactctatcaaccagtcgcccgtacccatcggcgaccaactgtcgtcgctgcgctatgttgtgttgctggcgctcctattgacggccattccatgctacagttccgccgccatatcaaccctatgggatatgcttgccagatctggggaatgaccgaggtcggtgtgatattccagacccgctggggccagcagggtgaccctggaagtatcggcactcgtattgccggatatgaagcccgcttgttggaccaggatggcaaaatcgtgcaaggcgattgctgctcgggtgaattgtacgtgcgcggaccaggcctgctcactggatacaaaggtcgcacagacgcactggagccacatggatggttccgaacgggagatgtagcgtacgtcaagcagggccaatattacattgttggccggacgaaggagcttatcaaagtacgagggtaagtccatcgtcgattcccagttccctcatcaacttcacatactaatcattttacagatggcaagtagcccctgctgaagtcgaaagcatcctcctgcaacacccaggaattcttgatgccgctgtgataggcgtgaacaaggatggtgtgggcgaggtaccccgcgcctttatcgtgcggtctcgtgacccatctgtgcgccgcataaccgccgaacaagtttacaactttgcacgccggcaactggctaaatacaaagccctcgatggaggtgttgtattcgtggaagagatcccccgcactgcaagtggaaagatccagcgcttcaggctgtcccagatgaacacctaccgtgagatggtggcgtccctgctatcccgattcgatggtgaccgctccgctgcagtcactgcggctcgacgtggactacccgctccagagatgtcacctgttagtctcattcctgaggggcgggttgcggtttgaattaataaagcggggcatagcattttgcactatctatggcgcatataagttgttcccactcattcagcggtgaagcaatgcggtgaatgagacagggagggtgtttgggttagaacctggcgttgtatatttggtttgtgtatttagtttgtgtttgttttcgggtgcttattacatgttgatttttacgatccagactcaacctccttatgatgtttttaaatgactttaattattcatcttagcattacccagatatcggattctctaaatcgtactacctaactatttgtatttgaaccttacaaatcacacaaaacccgagttctcagacataaatttatgtctagtggtgaaaaaaacctagatgatccccaaagtccgagccacagcatgtatgttgtagtgagtcactactccgtacctcccacaccgcacttccaagccccacttccctgtcccaggccaaggccaagctctcggttcctgatatcggcttgcatccgaaaaccgtacacagaaaaaatgtgatgtataaacaacaactacctaatatattttatggcccgagacagtcgcgttcgcattatgcacatgcaaggtccaacaaagtacgtggggctggatcgaacggaatccgaatccgagatcgatctcgaaaatcccacgatgaagtgcatccgcaccaatactatgcagggcccaggcgtccacgggtggaaccttggaaccccggttccaaggttccctgtaaggaggttccttggtactaaagcggggatcgacggagctaaataggttaattattgatgctcgattaggttgcataaactagttatataccctgctctgcctgaaagcatagatatgacttatttgatctcacgtttataataaagacccagaaagccgcataatatggttactgtaactggtaattctctatatagtcatactgccactcctgcgggagtctctagtcctgcgggaactaacggcgtgctagaggggcatcatcaaatcaacaaatcaatacaattacttttcaaggagcgattaacagcgagctagggaatcacgcacaaagtaccgcttgaaaacaaaacgagggagtaacaatagatcagaggagccaatgtgtgatttgttcccgactactccttactccaccttggagaagctctagaccacttggtccactcagactagctggtccccccagactcctcggtctccctagaccactcggtgtccaaagatgatttccataagcagtagttccccagacagaaaagggctccgtatggaagagggctccataaggaagaagactacatatggaagaccctccgtgtggaagaaccctccatacgcaagagatctccaggtgacatactagtcaagttgcgacacccggatagggccgcgacaggacactaaaaggtgtcagcaaacgacggcttggattggtcgcttgcgagaatggagtggcaacataatcgggggaaacattggattcgatacaatacaactgaacagggataatcgagggtgtaaccaaagtgggaatagggcgtttcaagatagcgttcgcgacaaaattaatgggattcgacctctaggaaccctagtgtccggacaaggttgagcaacatatcatggcgcactggtggccaccacgcagtcttttagcatttccaagaacttttgatttatcagttcaagaagctatctcgaactttaaagacgtgaggagttcggaggtaatcatagataataatacataagtaaaagcaagcgtggtaccagaatgatatggcatgactacccactagtcgtgtgtccatgcatcatcgtagggttcccaaacagcgacagcagctcgacataaggcacatgttctgactggagacattccatagcagtttcgaagtccaacatggtcacggctcctgtctccctttgatataaaacgttgtgttttccagcatcgggcacgtagattgacagagaccgaagaatgcggatggccttttcacattcctcacggacgtgggttcgctcgcggttgctaagttcgtcccagacatgggcgaggatctgtccatccttgtaggggaggacaagcgcccttccgttagggaataaactcgagcacattatgttcccagcaagtatcatgttcgcgaagacatcgtaaccactaggtcgtgagtctgacagacgctcatagacagcacattccgcattagacctagacgaatacacatggtgagataaggaccaggataatagcaatcggaaatatacttacgcccgatcttgtctgggactccagcacttcacgatatggcgtgttccttggtgttcaatctcgaagagagccttgtctgtgtggctagggggtgaaattctccgggacacgtttaagatcgaaatcgctcttccctggtggccgagaatgattgtattcggggtaacgttcccgttcagtccggtcactagactgccctcaatggcatggtctctgagcccagaagggcggagagaagcctgaagatcatcttgaccccgaagctgacattcatgttagcggaaatataccaacaccctttgaatataacttactcgctctgccctgaagtctgaaccctcgatgtagtcatggccctgttcagcaaggatacagaaccccgcaaaacactgccgaacagacaaattcgtatcccggtctcgaatcggtggggagacacagaaggcgaagtcagctgtccgcttgacgaatactgtcccccggtatgtcgatagaaagccgtagcgcaacccgaatttcctcatctgcgccacgagttgacctataaatatgtgagtgatagtagtatggcgctaggatgagttgcacataccaagatggggtaaaatttgcggaagaatcacggggtcagacggagaaaatcgatcgagcgcgacagtccagtaggtcttgagttcgccgactatcttgacctgcgcttgggagtcgttgctgagagtcacacctatggatacatctgggataacgtccgatgttggagtttcaaggcttgaatatctcccatcaccattgccggctgtgaggcgcgcacaagaatcttggcaactggctcgcagacattgttgacgaaccgaccagataagccgatttcatttccgaccaggtatacctcgccgctaggagagtcgatgtgggcaatctggaagttaaggtccagcgatgcgagggctgatcgtatctcctggtcgaatgtagtccactggtggatgaacctttgatgtagccactcggtggagactgacgggtggctcgtgccacgggcttgtcgtaagaggggcaaaggacttgcaagaacttgaccggccgtctgcattttgatcgatgatatatggccaggttttaatgaagattcgagcgggatgaggaaaagaaagagaagagtcgaggggaggaaggagcaagatcatacaattaagcttcccggcactaaaccttgtctggtcgaaatttcgatttataaacttggattgttttcgtatagatattgttgtggtggccacgtgccgatcacatgccgttgcctggtttgccaggcttcacatagctatttagctagatctcgatcgtttgtaggaatctaaccttctacatatctctctcaccgctccaagagctatggttcatgctggatgtcttcatggatgctttgtcattatacaattaagatagatcgaagaaacctatcttaagatttccatttccgattctcatcagtaatcagacccctcctcaacaaccattatttataatatatccatactcttaatccccagcctcaaataataccataccccatccaccacacaccccaaaccaaaggtgccagcgccccaagaacagctgccccaaccgacaactccagaatgcaccaaatccaaatagtcccaacagcaggcgccttcttcataaccgcataatacggctctccattcgtgatagcgataagatgcgcgcccagcagcagagcaagaggaagaaagaccaaagtccgcggagcaggtgggaaaaccagctttcgtaagaatgaaaatgtgaatttatcacttgtcaatgggaataaagaaataggagcaggctctgcctttgcatcctttgagctgcgctttgtgaaggagacgatatgaccgtgtgcgaggtggacgaataaagtgaggagagggaaggcggttgtcacggattctttcaagagacttggcaggtcgattctttcggcgtattggtgggctgcgaggtagcctagggtgaggtggagggttgtgagaggcatggaaagaaggattgtgtcgaggaatggcggaagaggtttgtcgggttccgattcggagtcggatttcttgacagtattatcatttgtaccctgttgactattcttggtcttcttttgggaggcattggatgagagatggctgctgatgtcgccgtcggtgtcgaccaattgcccagacgcgtcgactgtcacgaatcgggttccccctgactgcgacggtatgccttgtccttccaccgaagctggaattgatcctcccctttgatgaagtgcgccttgtcgctctgcgatgatgtcatataatgtgcgctcgactgttggtttgtttttggtcggatcattgcgatggggatgggccatcgctatttcgggttcgtcgtttttagaagatccagccgctgcacgacgctgctttcgattccttggtgtttccatcttgctcaggctggtatggagggacaatgagtggtggggggaaaagagttaacaaacactgacgtggagaaattgaggttgaggactcggcgataagccccatcaatcggggttaaggtgagctaagatgatcgccagttggctcataggtctaggttatatttctcaggcttgggatagatatgaaaacaaacttttctaaattcatcattgttgctaattaattctctgcaccctttgacacactcgttcaatacatggactggccactcattcaaccagcctggtatagagctggaccggcaaccacatgcgggttaatcaagctcagattgaatggactcacgtacggattgctgtctgtaatggcaataaagatggtaccattgaaagctgggtcaccttggtaggtttccaggctcggctgggtagtatatcctcgaatgccatcagtggtactgctggtcctattggagctgctggcactattggtgctgttggtgctgttggtaccattgacaatttccagaggggtataagtaatgttcagctgcgacacccaaagaacatactttgcgctaccagctgtcgtctgggttgtggtgacgtagctgttgttgggaccgatttgcttcccaggaagatcccactccaataacaccgtccgacccggggccgagagaggcactgggcgaaccttactaacagcagcgccgcagccattagctgagccagacgagttgaatcttccgaagccttttgctgacttgggaatgctgacgcctggtccgacagtattgttgattccagtggtctgattgaacataaaccctgcagtctgattgaacccggaagtcgtgttgagccttgagatctgatcgccactcgaagtaaaattgtacccagtagcgttatgcccagtcgttcggttattacccgagggcaagttgcgataagcccctggactccacggatcgggctgattaaccaccatcagcgttgggaaattttgccaaatcacccgggtctgattttcaggacaagagctgatgaaaggtgccagcagtgtccaagcccaagactgcggtatgccaacttcaaaccattcaaccatcgggaagagaccctcgaactggcggaagatcaattgctgccgtgcttccgtagtgatggactgagtcaagagagtggccgcctcgcgcgagtcaagatgagccaagaacccatatacgccagcttccccccagcgagtgagtttctgacagaagtcgataaactccttgacgttggtgtacgggtagatatagttgcactgcttcggggcatgagctccgaggatattgctgagcatagtggcatggcctatctcttgctgcgccatgaatgcgatcacctcgcggtccgcagcggtcaaaccggcggctcggaaggctgcctcgtcgaaacgcctgagtccctcttggaagagatcgagctcaatccattcctggtatagagccagagcctggttattgcaggttagctcctggaccagaacattgcttcgctcaatttcgtgcggatacataccaaagactcgtagtcgaaatcgcttttcgcgttgtagacgggcgtgcttccgttggtcccgacaccaccagccgggacatatggagcaggctcggcatggtaaagatttccatcactgggatatgatgtcgccccgggtgcaaccccaccgcgagagatgcttgttccgattgaagaagccgtcagtgcagatgtggtcgtcggtgttccagtaaacggtgtatacagcatggagctattgtaacttagaagtggcggcgctgaagccgatgcatttgcagtcggcaatggcgagtcagcggttgtagttccgccattttggtgtttctttggagaagcagccgtgaaaggcagtgagctcaataggctcaacagaatgatactgttccagatcatctctggtgaaggtcaaagtcgcttgaatccaagacagaaaaagaagctcctttatccctggtattaaagcattgggtcagttgtaattgttggaaagccggataggtacggaccttgcgtagagtacatatagtgctattttagccaatatcatcgccagccaaggcaatccaaagtcagggtcgttagaaaatcacacaatggtgaagacaccatcttcagagctaaatgtgggtagctttgaacggggatgaattccgaatggtgtttatcctcgtcagagcggacgttcttcgtatacttggctagtttagtagttgcaagatactgcaatccccacttagagaacaatccccgggatgctcggcaacagacgacatcggcgcactgccaacattccatggacctgaacagactaacgtacaattcgagataactgtgggggtggaaatcgaatccgaccggacaatgccggatagcgtttgagggaacaaggggaaaaggctatacggttcttagttaaaccatcagcaaaataaatatgtaacaatgagagtggtagaaatagaattgctctgtcgctggaatccatggagaggcagtctttcctatatagatagcccggaagtcgcagtacacaatgccagagcagtttatcaactcaactctataagtaccagatctcactgtgtccgccagccaccctctcccgaaaagtaaccataagtatcgcaatggggcacattggcagtaattctcacaccattagaccaaacaatctccatagtagagcccataatagtcgcggtaaaaggttcacgactctgcagggactggcggatgctttcgagctccttccaaggaatattgacgactgcaggggcccgttgaaatggaaccgccggttggccgcgagcattcttctcgaatacccatggctcaccgttgatcatgaatacaccagccagagaatcgccgttctggctggttagggatccgatccattgagtcatgactggatagtcagcgggcaactctgcaattttccaggaaaggtacttaccggctttggggaatttcgggagctgtgagaagggagaaactaggaagggggttaggaagggggctagggaggatttgcttcttttgtggcacatttacatatctgtccagaagatgcgacgatgaggatttgccgtgtatcccggccggacatgcagagtttaccgctatatccatggtgtcatatctaaccataccatgaatggatgttccaattcaccgctcgttcttgttatgctgtagtgcttatgcggcttcttgaatctttgccgtatatgataggagcattgccgaaaagtggcttaagtttaaaagtgaggagtctttagccgagtataagagcaaatcatatcgagctatgattaaactctagaagtacgaagcacccgaataggaagtatacagacatatgacctgtcacaggctctagggcgaaagtggatcggcaagcgttcccgcacctaatttcctttctgtggggccttgcaatatatagctgggtgtgttctttgcttagcactctgtaatagccctgataatggtctggtattatcggtctgtagggttacggatattatcatcgggttactgagttaccaaagcgaccctaatcaaatacatcatgcaaatagaaccatattgggcagatgctgcagctactattacatgcaggctagacagctgcatggatcttcctagtcattaagaagctttgaataatttgaccaggctgctaaatgtttgtgtcaagtatgatggagttatgcagcaagtgggccaacatagactagaaatagtggagcgtatagcttgggttcttgtatattgttcccattcggcaatcagcgaggttatccgtgtagatcagaggcgaccttatatcaaattaactaaccgtgttcctgcaccagaaagactttgaaggtgacctataagctgtgagcagtggaccacgagtatcgcatatttgagctagcacctggaatgatcctgactatctgcgtcagaaccgttatccataaagcatcgaaatatcacaattctttggtgtgcatgggaaatctagatgtggatatcctgcatgctcaaaagagaaactatggagctgccctaaacttatgcaatattactaactccaatattcacaagcgttcgataaactcattccaacacacacatttgtaatatgtcgagatgaatggaaagtcggcgttgttgcatgaaatcggcgttcctccgtgatataatttattctcggcagcgtcgccgatccaaagcggggaaagagaaaccccagaatgccgatatcgcggggccttgatttctatagaagacatcctctcttctcttcatccaaaccatcaggttgcccaactaaccaccatggcccatcttcaagcatcgaatctattctcggtcaaggaccgggtggtcgtgatcaccggcggcggaagtggtaagaacctaattatatcacagatacaaacgtgtacatgtaagctaacagaaacacaggcctcggacgtatcatgactaaagccctggacgccaatgaagtctccaagatcttcatcctaggccgacgcgaagacgcgctacaagaaaccgtctcgcaaagcataaacggcaccatcatcccaatccaatgcgacatcacctcgaaagaatcactggaggcagcctacaacgccatcgccgcccaaacaacacacgtcgacctcctaattgccaacagcggcataatgggtcccctcatgaagcccccgcaacccgcagcagacgggaccctcccgccgctgtcgcaagtacgcgatgaactcttcaatatccccatggaggagtttaacaaagtgatgaatgtaaatgttaccgggtcgtactacacggtgctggcgttcttgcctctgctggaggcggccaataagcgccgtcctgcgccgcagaaggatgttcttgctgccccgactgcgcaggttattatcactagctctattgctgggtttattcgcaaggtgccgttcagcttcgcgtataactcttccaaggccgctacgacccatctggtcaagatgctttcgacttcatttgcttattacggtattcgggttaatggcatctcgccaggtctgtactactcagatatggccaatcatatcttccaggctgcgggtattgagggtcgcgcgatttctgacggctcattcccgagggacatgattcctgccactcgcggtggtagtgaggaggactttgcgggtttgattgtttggctggctagtaactcgggtggttatatcaatggtaatatcttagttactgatggtggtcggatttctgtttgccctgctgtgtactaagtggggttttgttcaggccgagtgcagtttgggtatacagctgtactgagcttcaatgaaaatagagatatgtagagttcttggtttccagatatgaatgtttaaacgctcatgagtaaaggcaaatgaaaacacgaaacgaaaatgaccttcgcaggccaatctcaaggtcatggtttgactatttagtaagtcgccgtcaatcgctggaccagataatcgcctgaagtaatcggcgagtattttttggccacttggatttcctcgccaaaagttcccggcagcgcttcaataagtttatcgttgttaggctggcagaaatacgctatgctgtaccgagcaggatagtccgaagcatcatccccagagccctcgggcacgggtggctgaattactcggtgacgggtactcttgatagtgtcattggaccatcgggcaagcagatccccagcattgacaacaatagcatcagcgatgggagttgcatccacaaaggttcccttggggctgcgcacttgcagaccgccgtgtcgatcctggaaaagcagagtgattgaaccatagtcgctgtgctcgccggcacggacttggttagggttatttttgaagacttctttgctgacagaaggatagtgaagcagacggaggttattgtcaccggcattgacagagtcgtcgaagaagtgctccggcaaattcattcccaatgcaatggcctgcatgatatgtttatgtagggtctttcccatttcaaagaatgactgcatagtttttttgaaatcttttccttcgtcgtcgagatgatcgggccagcgattgggcaggccttcgactccctcacgaccaagttccatagtctccttgatgtccggcgcggacgcacgaagagtgtcgacgccagttgtctcgtcgacggtggttaacttctcccgcccgatagcgacgtaaccacggttcgaccgcggggtcgtccagcccagggaatccttttcactctgggggcgggcgaagaaacgggcagatgacgcaaacaccccggacaccacggatggcggaatgccatgtgccttcagataaaggaagccggatgttttgaaggcttcggttatggagagagcgacggcatgtttatcggatggggtccccgtgaagaatgggccgaagtcgatcagctagagcagatctcattagtcgtggcttggaataaccagagacagagcatactggtatcttcaaatcatccttatctaccgcggcagacgcttgattgtcgggggtgttggaggtcattgcgtacacggcttcggggaatttgtatgaactctgttgctgtaagaaggcaccgagacagtgacagaagcctgtaaagcgagtgcacgaatggaaagaaaagatctcaagaagaggggaaagtcggagaaggggaatatcataggtcggcggcatacatcgacagataagcgtggatggctgggcagataagccagaagataagcgtttatattcgatttgttggagatttgactgtttgtatcgtcgaaggaatgttatcaggccatttggtttgattgctgtacatttgatcgtgaactgacagcgcagatcaagcccacatcccccactcctccccagtgacccctaccgacatagatcttcgcatctcaaagctgaaaagagggcgcatcaaagaactaaatacgctgctgacatacagtgatgaatggcgacaagactcccccgaggaacaaacggtgcgattccacatcttttaccacaacagtcgaactaggaagccatgtggcatctctgtcctccacgagcttcgtgactatacaatcctttccgctatgagttctcaactgagcggctattccattgaccgcaagaacggtaacaggagcaacaaacccgtatgggtcctctgtagacttcataaacgcaatggaatcaggaaatccggcagccaggaggttcccatctgcatcgagggacagattatcgatcgggtatcccgtataaatcttgtcaacttgaatcagctgctcgccaaccaatttgtgaacagtgacggctccagtcactgaatgagccacatagtagagcccgttctcctggacgatgccattggcaaaagaaaagcctttgtcggcagcgacatggcactctccggtgtcagatcgacaataggtgaggcttccttcgccaatcaacattcctaacgccgcgaaagtgctgaccttggcgtcgtggtcgttggtaattacgatccccaagccatccttgtcaacggccaagttgttaggcgagatgatcgcgtcactggctatagtcttgacatactcaagtgtctctgaggcatcgttcaaatcgaatatgtcaattgtggaattcgctccaacggcccaagcatcaaggaacttccctgttgtaggttcgattgggggtctatgattgatcaaccagaatcgaagtctgccgtcaacactgcgcacgtcaaatccatgtagatccagattgccgaggtagccactgattttcagctgatggaggccatacagcccgtccgggccgggttggtcaatattcaacactgcgatatgatccgtgcgagatcttgcggagatgttgtattttctgccacccggactccatccctgtctggactgtatatttccgcatgctgcgtacagtttccttccttgatcatctagccacatatcctcacatccttctaagagagggtgctggaggcgagtgcaggtccatgggaattcttcaattggttggatctctcggccgatgccgattgtgagaaagataatgttgtgcaaataggctttgtaaaaaattcccagggcgagcacaatcacggcccatctcacagctcgaagtctgataattcgagccattgtgaaggttgggataaatgatgggccgatgccttgatgcctgatttggacctggttcctggccgcttcctaactaactatagttaactagtgaccgctcttcatttgttactctgccggtcttcattcaggcatccaggccaaacacaggcaccaaggcatcattatttactccaaatgaaggtttgaccccgccaaggttccaaggttaggcggggctagtcaaccttactaatccttggtgccgatgtataactacggaggattaaccctttttattggttccaagacgaataaaatgagcatgaggtagttatgcgttgaacatgctcatgctttatgtcttggatctgcttgtcctccgtactctgcatatcaccaaggcctcggccctccacctcgaaggttccaaatgtccacttgcacattaataagctgattgggaatcactccacggacctcggtagtagctaaaaccccaaggcttccttcatcacctccatttccaatatacactatctctccctttttcattcaaatacctctctcgccaaaatgacacacactgtccttgttatgtacccgaacgaagtcgacgtccactttgacgagacctactacatgaaaacccacgtgccactcatcgaaaacatctggaagagccacggcctgatcagctggcatgtcaccaagttcaccaccgcgcttgatggttcgcgacctcagtatctggtgatcaccactctccagtgggagagcgaggagtccgtgaaagctgctctgcagaaccctgccagtgcgggggtgtttgccgatgtgcccaacttcaccaacgtgaagcctatcactctggctggttccgagctctagtgttcatgagtgtatgtcaaattgcatgttgatgattgcttcagcgctgaaattgatagttgccaatgaatgaaatgggaatggattataaccgagtcttgaaggccttggcatttttaatgataagctgtatatctcctctatcaagcgatagcacattcaaattgcattcctcttctgtacgtaacatcaaaagaccacagaccagacttatcggagataaagggattgtaacatctccgcgcttcagaggggcgtccccgctcaacagctcttatctattcctcccctcacttggatatccgaacttggatacccctgcctctctcttcttcttctcttttctcgattctatctgtattcccaaatatgtcgcgccctctagtagtcgatgtccacacccatgtgtaccctccatcgtacatggcgatgctacgcgctcgcaagacagtcccctacatccacgacccagcgagcggagaaccgcgcctgataattctgtcatcagacgatgacccatccattccaatcgacgagcgcggccgtcccgtcgacacatcctactccgacatcaatgtcaagctaaccttcatgcaacaacatggcattgactgcagcgtgatctctctcgcaaatccctggctagacttcctcgatcccgccgaagcccaacaatgggccgagcgcatcaacaacgatctagaggaaacctgtgcccagaacaataagtccactgacccggacaacaccctccctctgcaggggaggtcaactttgtttgcatttgcgactttgccgctgagcgcacccagtgcggatatcatcgttaacgaaatcaagagacttaagaccctgcctcacatacgcggcgtgattatggggacctccgggctgggaaatggtctcgatgatgaagcgctgggtccggtttgggctgctctggaggaaacgcagttccttctcttcttgcatcctcattacggtctccctgatgaggcctttggtggtcccgaggtaacaaagcgctacggccatgtcctccccctggcgctgggattcccgcttgagaccaccattgcggttacccgcatgctgctgtcccgtgtctttgacaaattcccgcggctgcaaatcctgctggcgcattcgggtggtacgttgccgtttttggcggggcgcatcgagagctgtattatgcatgaacggaagtttgtggagaatggtggcgatgtccctggtccgcaaaggagtatttgggaggtcttgaagacaaatatcttccttgatgctgtcgtctatggggctgctgggctcaaggctgctgttgctgccgggggaggtactgatcgtcttatgtttggtatgttctcatatatatttttggtaggtggactcaagctaatataacataggtaccgatcatccgttcttcccgcctctaaatgagggcgagaaggaatggatcagtgtgacaacaaattataaagctattgatgcgactttcgagggggaaaaagaggctgtggctgctgttttgggtggcaatgcggttcgtgttttgaaacttgaataagcacatatactatctagcataaatatcgctatacggtctgtagatataataccaatagcaatgaggtataaaggagcacagtgaacaaacataagacaaatgtagtcatgatctcaggctttaggttggagcaaccacggtcctcaacacatcccaaccaacaagccgccacagctcctgtgtaagccaatccgaaaactctctctgatccatctgtttattctcaagtacctgaggaggcggagtatgcggacgccgcaggccctcccgaaacagatgatcatcaggtccgaatacagcccggaggagagacttttgcagacgatctttggcttttgtgacaaactgccgagcagccgatgcctcgaggggtgattgacgggactcggcattaagcattctatccagaagccgaatcagatacttggcttccagttgtgcctcgttcggcccaagacactcgtcagtcattgcctccagtccgtctgggaacgtcatcccggggcagatgcccattggcaatcgcaggtcatggaacacgtgaagagctagcattttgcccattcgatcaatgacaaggaagagaaacccttccattacttcctggtcttcggtgcgcgtgagattgagggagagggccatcgtgcagagcaggtctgcaaggcgaaaggttatttcattcttggtagctaagctgttcgcttttggacgtttgctttgttcttcgggttgcgtggtaggctttgggtctccactcgattttgtgtttttggtgactggcttttgcttggatattgaagtacaatgcaaagtgagtgctctcatggttgattcgaacagacctactaagtagtaaatgacttggccttggtgctgcattctattcttggctccgccaatcttgtgcaatgctttgtgtgtgagatggaaagcaactgtcacaccattcataacatcatgtgtatccggcatgttggcttgccctgtctgagaaggtttctgctctgtcatactgctctccctctggatagtttggatcagtttttgctctgcggatttgcagaggatgactgccttcacggccagagaattagcctcagagctgctagttgtccttctctgcagggctttttgaacggtatgcagatgcctattgagacataagactgtaatgacattagttatcatcatagtcggtcgatgaaaggggaatcaaataccatcttcttctcctgaatcatcatcatccatcaatggtatgcttttctgcatattttttggtagctttatgcgtttcttggccatgtttgaactattcgtattcttgccaacagcagacgccttgcgtttgtttgccggcaagctctcgttgtcatttgcagtgccattgacacgcagtttgacaagaaggccttcaatacgctggttaagctcatggacttgatcttgtagcttgctctgtcctgcctcggaccgttcgtatgcctgttgccagaaagagacgctatcgaagaacttgtctgttgcaacaatttggcccaagtccttggtctttttaatgaagtgccgaatctgcaaaatgtattctaaaatgtatagtcaataatcgaatggtctgagtctgtaaaggttggatcttcgcctaacctttcacgctttgccctggtggttttcccttgacaacagccaatgccagggctaattgaagctgagttggaggtgtaacactaagtttagatgttgatatggttgtcatcttgtcaattggctcgaatagatcatggctcgtggtaaaagagctaccacctacaggttgagagtagaaactcaagatgcacacgtgcccaggcattatatatctctacctcgatcgtacaattttagtcgtaataaaaaccagactcaatttttgaaaaatttaaggccaaagcctgacgaaattccgaattctgaatgctttgtttcaattcagcagcttaaataacagatttgctgattatttcccaattaggatctcatagtatactggttggcggcctgaggcgaaacgcatccaccgcccaagctctgaactcgaacctacaagtttcaatctcaacaacaacctcagttcaagagctctaatctagggttaatttcctctcgggactatcactgtgctctttataaccttacgccctgatagagcaaccacatagccgaaaaccgccacatcaaactctccacttcatctccgcaaacttccaaggcgacaccagtcgcataaaccaccaagatgccaaatgacgatctcaaggcgcacgccgcctcgaaccaagatttctacgccctgctagacatccaaccagcagccactgaaaccgaaatccgccgcgcatatcgccgcaccgcactaaagtaccacccggacaaaatcaaaaaccccaccgcagcagacatcgacaaattccattttctccagattgcctacgatgtcctctccgacacatcagtgcggcagctctacgacaatgcgcgggaagcgcgggtgcgtaaacagcgcgagcgggacatgatgggagcggcgaaacgaaagatgcgcgaagacctagaagcgcgggagagggcaggcgccgccgaaataggcagcgccggtgtcaagcaaggtgtcaagagatcatgggggacggacggggacgaggatgcggaagagaagctgcagcgggagattgacaggattgcggaggatgggcggcggaggcgacgcgaggctgaggagaaggctaagaaggagcttgaggatgaacggaagaagattcaacagcaggaagaggaggctcgcaaggcggcggatcggagtagccagcgcgtggatcgctcgaaggagggtggtggcgcgcaagtccccgagctcgagcgtgcggtgaaagtgcgctgggtgcgggagggtcgtgggttggagcttgatattgaacagcttgcggtgctgttcaagccgttcggaacgatcgagaatacccttacgcttaaagataaacgccaacggattggagacaacaaggagaagaagactgttgcaacgggcgtggtggttttcacgtctattgtgagcgcccataccgccgttctcgatagcgagaaaaagcttcgtcaacatgctggtcaagatggcgaatggggccttatcgagtctgtcttctgggcctccggcaaccaacctgatctaggtcctggtatatcacccaagcccgaccaggctgtgcctgcacctccaccaccagggccctctttcgacacttccagcaagcctactaaatcatcattcaacttccagggcttgaaaacagctcccccacctgacaaagcgccctcgtttggttcattcgcttctgcagctgctgcggcagctgccccgagtgcaacgtcattcaacccatccactcaggctccagccgcgccaagtctgcaggaggtgatgatgatgcggctgaagagtgcacagcgtgagaaggagcgcaaagccctcgaagaagagatgctacgagaagacgaggccgcagacgcagcggcagcagcggcagcgaagggcacctagctctcccatggaggctagcttcatttctgcatatttgaaaaggttgatcctaattctaccattgtatttagattcaaaagataccccagagcacgttgtatttgcaacgttgagttgaatagagatacaaaagctatttacatgtgacattttgtgctgtgttatattatacatgtgtagtgagtatacacttagaaacctcagtctcggtgcgattcggcttcctcttcctcttcctctaattgctcctcttctgcttcacgatcacggggagcgggtttctcctctttgccacccgagatgaactctctaagccaaggcggaacgaaagctcgtactccgacctcattaggctgttcgacttccggagcccaggatagcttgaagtggtgttcatgaggacgagcaggagcctcacccatgagcgcaacatcggtcataacttcaagacggcacagcgcaagtccaatattgccaacgccatgaaggaacgttcccgcactgcggcctcggcgggtagtggcaccagccttaataatatctgcttcaccagaaggtaaagccaattggaaagatggatcatatgtgagagtatccggggcactttgcccatcctgacccaaatcataaagctgaactggcaaaagacgcttccgcgtaacgccacggtggtgggtgcgaatcgtcaattcctggccgacataacagcccttgcggaaatcaataccgccagccatatccatattgcactgcaaaggcaaagccgatccactaataacctccgcctggccctccgcaacgccgtgtagaaagcgacggacggtgtatgagtccagcgacacctcggacccgacgacctgagcctcatccgggaagtgagtgcgcagactgtccgagccaggcgtaataatgcgggatccgaagcccggagcacgcgtgtcaatgcaaccggcaatttcggaggtaggtgagaatggtgacggcgattctgactctagactgtatgaagcccaccgttgcggctcggcgtggttcttccaggaggaccatattgtgcgctcgccttcctctagagcgcggagcttgagcttcgcgcgcagcttgtgtttcttgaggtgcttcagcaggacggggacctggtttttgtctacctccactagccagcctgactcggcaccctgggcctctgcgccggggagcgggtaaatgaaggcatcgttcagaactcggccttgcgaattgaggaatgcggtgtatgcgcctgtgcgtcgaatatttcgtttcggatcgttggggactagcatattctgggtcatcagaccctggaggaaggttgtgctgtcgatgccggtgatggagatcagtccgcggtttgtgagtcggctgtaccctgctgtcggcgggaggggcgcattttgactctgttcggtacgctgtgctgtggtagagaatagcctgaggcggaccaggcagcggccacagaccgaggggcgcgggcgcatcatggctgagttggtgtagcggagccaatgtgagttaatctatttctttacaaagctcgatgacgttgggcggtgaaccgtggcagtaagaaaggttattactccttccgccctgaataattccaaagtctagaagctacaattattctgaaggtgtaaaaaactaattaattccaatactacactatttctatgtatgtcacatgtgcctatctaggggctactgcaaagccacctaggtaagcttgtaaccggccgaccacggagctacttattgcccttagccactccctccaagaacccaagcaagaacgccttgttgctcggagaagaaacctgctgactattggtgtgtgcgccagcatcagatggcgtaccatgccgagaaatagaatcaccgctgctcggacgattgcgggacgaaattgggctgacaaaacccgagaatgctgccggctgctggttgacagctcgggagtcgaacgcggtcgtagaaacaggcgacggagagacaggcgctttactaaagagagacaaaagtgaagctttctgctcagcagtttgactcggtcgacggtcaaagttgctctgtgcggctaggccctgggtatcgatcccaacgcctggcaaactcaatttgcgttcaatagcttctgtctgaggagctgtggccattaatgcttcatatccgggtttttctgaccgacgcagaatctgcggctggaaattcctgataggttcaggcgcctcgggtattttcgcaggcagaacctgggttgcttgtgcaacgggtctcgacgaggatacctcccgtttggcagaatggggtcgcgatagaatggtaatcggtgaggatagctgctggagctggggttgctctcgccggttcacgtggttctttcggtttgttccagtgtttgacttaggtggttggccatatgtctcaaattgtggcacgttcaacggtccagacacggtagccgatatctgacctgctcccggaaggcttctcgttgcggcaatctggtgcgtgggttggtgatcgcgaggacgctgaagaatctgcttctctgaaggtgccgcagagggtacaacgggattgcctaacaattccgctggttcagaaacacgagcagtttgcgcacccttgagcaaacccaaaagactatcctggtgctgagacgtcttacgtgtgtgagaagagccctgcatgggagccgccaaattcgctggacccgggcccttgggggtcttaaccttgaaggcttccaagagcgccagggaatggcttgtgagcttcggtggaggcaatttgctcgccggtgggacgactgggccccgggtttgagataactgagcggattcagaaaactcagggtctcctgtccgttgaaacggtgcgggcatatggctcgggttcagaacgccaggggccataggaggctgattatggtgctgatattgagacatagtggtggtttgggggaattgtggtatcgcgttaggtttaggataccaattaggcgcactggtcgggaatgcatcgccgggaagagcttgtgggccattcaagaagtgctggatatgaggttgggatgggacggtgtggaatggtgtggagttctgccgcatgaaaggagacggacccatgttctgctgctgctgagggaagccggggaagaaattaggacccaaatgaggccgttgttctgcagattggacgttggactgagatgcattaggtggcgccatagcattaccaagagaatcccgaggggatgtctcttgacgcccacgctgcaacaaagcaaggagcccactcgccttggatgggtcaacgacagaagcccgagctggctcggagcctggtgtattaacttgcgccggtgcggcgcagatgttcaaaaggcgtttgaggtgatccgaagcatcttgcgctgaggtcacctcaggaagatcacttggaatggccatttttgcgagggacatccctggagtgccattgttagggccattctcatccatagaaagatatccctcagcctgtgcaacttggtttgctctcgcatcaagcttcttctgctgcgctatccactttttcagtgggctgagaaacggggcaaccatgtagaacttgttcgcatttgcgactgcaagtccttcatcgtgctgtttatttttcttcagcgttggcagctctgaaagcttgtaccactcaatcttgctgatttcctttcgggtacgcggttcaaagtaagtatcacggagcacacctcgaaagacgtagagtcgcatatgctgctctctcatcgtaatctcaatgtatttaacgtcgtcgtcgtttttaaccaagttggcctcccgaacatcgaacccagtctcttcatagacctcacgaatagcacaatcaagatccttttcgcccttgttgattttaccacggggaaaactccagttggcgcccttcttccagcccttaaccaaaacaacctcgtccatatcttggttcaacatgattgcaccgcggaccggcacgcgcgtcttgtaatcaaggaattcttggaaggcagccaaatgatggtaatgagaccatgacgacataagcgggcaatgttggaaaatgcgcatagcaaatgtcttcaagttcattgacggtagcgcggggtcaagcggacgaatgaagtcttcgtagaaccattgtgcttcttcaacttgaaaacatatccgttcaaccgactcaagctcctcgcgcggaagattgataatgaaacggacgcacaaatcatccagccctgtcagcaacggcccaccggcctcagtcagcagcccgtcgtcattccgatcgatcaaccaggcactcacaatcttctaaccgcatatttgtttcgatcatatcggtaggtagactctggcatttcaaacccttggtggctgagaaataactgctcactcaatccgacagcgcaaacggtcgaaataagcaagcaacagggtggagggaacagcttccagggagggtgggccaacccagggctgtgtggatatggtgaatggaatatggcggagaataatctcagcaggaagtacagtatgcgaaagcagtcgaggttccaatcaagtcagagaaaagagttgaggtgttgggaagcagagcaatgatcggagctgcccaagatggtgatcgggtgactaaggtaatgtgtggcggtgatgaaccaaaataatgtgccacatatgaatgtggctgtgctgtgggttccaagattctcgggttatgacgtgttgtcgcgctacctgactgttgatctcctggtgttttttgggaattgctatattaatcctcctcgtttcatagtcaagcaccttcctcaaaaatccttacgcgccctttatcttcgctgaatataggtgaaacgagcgcctaccgaaacacctatctatccaaccaggaagcgtttggggcctgaaaggatcaaaggctatatgtgcattgtttattttagttgcccttgctcaacattcgtctatttcttcagcccttctcccgtgaagatttcaatttctgcaactacttttatctcacggttgatctaaaacaaagatgtcgaaaattctagtgtctctgattagcaaaaaggtgctaggtgaaaccgccaataatcatttcggtactgaggtgagtccacttgaccgaccgacattcatttggttttgcgaagggaggtcaggctaacccaatattttctatctgcccaggacccctacttcgaagaagttcctgcttcacgccttggtcgtacatttggaaaaaagactcaaaagcgtcgcaaggccatcccgccggggctctctgagcatgatgccaaggtcctgaccaaggtcaaacgcagagcttaccagctggactatgctcttttcagcttgtgcggaatccgcttcggctggggaagtgtgattggactaattccattgtgagtttcaccaggatctatcacactagcaccgggaggagaccaattctaacaaatgaacaacagcattggcgatattggcgacgctgcgctcgcgatgatggttgtgaaatcttgcgaaggaattgaaggtggacttcctgctgctttgcgcatgaagatgttgatcaatgtgattctcgacttcgtccttggcctcgtccccttcattggtgatcttgccgatgcagtgtacaaagcgaatacccgaaatgcagtcattctcgaaactcatctgcgccaaaagggtgccaaggcggcctcgcggcagggcgaaagaaggcaggaccgagtagtggaagtcgacaatagtcttcccgatacatttgacagacaagaagatggagtcgtgggtggccgtccaccggcctatgacgatgtgcgaccttcaggtcatgggggaaggggtaacgatgccccccagccggccaaacagtcccggaacaagtcatttggcagatggttcggcggtgcggatcatccagaacatgatttggagcgaggtggagcaaggtaatgcatggtgcatgaatatattgaaatcgtaattccagataccccaagattgtttgtcgattattttaggtaatgcgggatgttcgccgttagttagttcatttaattttgtcacgaatcaagaatgtttgtcttcagcaaagctcccctggtcgagacctcatacatccgtagcagaattgagagctgtggttatcctctgcctgattcgcaacagtaactccggaattaccctgaacatttcccactaggctagcacaaagagcacacgttggtgcattatcagacgtggaggggttcagcttgtttgcagttctggccacattcgccatgacacctggatactttgcaccttggttctggacatatcgcagcatcaactcgtcaatagagaggttcttggtaaggacattttcggagggcggttgatcaggtatgacgatatcagagagctcggcacagacgctcgcatattgaagtaactcagccttatacagatcacggagcgggtactcgaaccgcacgccccaaggagacatgccgtcagatacctgccaggtgagggaagccccacgtcccttggcgacacccgcaagtgctttcgcagccagacggctgtccgagtcaccccaaatcacagattcacagccagactttttcgcaaattcaacgatcaatctggtcagcaagacggtgtcaacgtcggccctagaagtaggggtggaaatggatgcacggaaggcagctaagcggtcttcattcgaccgagtgctgtcatctgtgaattttgatcccgcatattcctgcatgatatcttccacttccgggacatagtcgaagatgctatgaaaaggtatccgactgatagtgtgcatcgggaaattcttttcaagagcttcgtagttcttatcgaatggaacgcctgtagccgcaacagttgaaggttcgatgatcaggatcttgaagtcgtatcccagcgggcgtccattgtccaggcgatgttgtcgatcggtattcaatatatgcaacaagaccgaggaggaaacaccaaaagacacaggcagaagcaactgggttttagggccatccaagccaaaagctctatagacactcaagcgcgactgaactttgtgtgctatgaagcgcctaaagcaggagctagagaaaaaaattaagtcagaaactatgagctggaggggttgtagattgtcgacttgtcgcatacctgcaaagctgcctcttccgggcaatgaggtcgaattctgcatccttgcattccatgcatgacttgctcagttcctttgctggcataatgactgctctagagtatggggctattcaacctggactctgcactcgatattgaaaaaaagtcgaccaaagctggaaactaaaaaatggtggcggtgcccgcttagataatggccacgcgcggcttccccggtttagggccatcgggttaaagaagaacaccttagccttacaaccctttttctaaacacgccttaccatattcggctctctttattcttgctcatattcctttatttgatgctgtgtggtcttaaaggcctcatcctgaatctcggagcatagtctcgcttcaactctacggtcgccatgaagggctggctccagacattgggcttgacggccctattggcaagctatgcgcttgctaatgacgctgaactagtatgtccctgcactccactatgggaaattgtcagggtctaacgttgttctgcagaaatccgatgatgcgcaccgacaacgatgctcagggatgtacagtcgcaaggcttggggaggagatgttgatcccttcattttggtgaaatttaccaagtcggaagctcaggaaagtgatcctttggctagtttggtaatcttcgaatggtccgatgagggattgattggccaataccggtccggcgatgctgaggtatgtctgtcaacttcatggggacaaccgacgcggctaattattggatttaggtcaaggaaacaatttgcgatgcctccaatgttgaggcaaaaatatgcactcaagaacagctcggctcttttgttctcaccagcaatgccactgacgtctccaaaagcccaatcatatcgaaagcaatccacctcaacaaccccgacgccgtgaaataccctgtcagaaagactggattctactgcgttagcacgtatgcatactccgggcaggactacaaagcagtggttaccttccgaaactcatacggcgaacttcccgctgcacaaatcgcaaagcttccattttatggagccttgacgatcgtgtacgctgttattggagcgtatgtaacttgcaaaatcgacggactcgataggttttgaactaaatgcttacgcgtaactttagattttgggccttcctttacgtgcagaaccgttatgacatttgtatgttgggttcccttctaccatccgagccatgctaatactggatagtgcccgtccaaaactatatcaccgcaattgtggtgttcctgatcgtcgagcagctgatgacgtggggattctatggtaagagacaacaattgattccttgcttgacttcttctgatttttctagaataccaaaaccgccatggtctgaatggcggcgcaaaggcccttatggtcattgtagcagtgctcaatgcgggcagaaatgctttctctttcttcctcctcctaattgtctgcatgggctacggcgtggtcaagcattcattgggccgtaccatgatctatgttcgcattttggccattggtcactttgtgttcgcggtcgtctactcggttgccagtctttcgatcacccctgatagcgccggtcctctagtgcttctgattgttctgccccttgccggaaccttgacagctttctacgtgtggaccttgaattccctgaacgcaacgatgaaggatcttattgacagaaagcaaaagacaaaggcgatgatgtacaagaagctgtggtggtgcatcctcggcagcatcattgtgatctttggtttcttcttcatcaactcattcgctttcgctggacgcagtgacgccagctttgtgcccgaacactggaaggcgagatggttcgttcttgatggctggttaaacctggtttacttgttcgatatcgcatttgtggcttatctgtggcgaccaactgtcaacaaccgccgcttcgccatgagtgatgaggtatggagctcttccctacatatacaagagcagaatcgagatgctaacatcccttacagcttgctcaagatgacgatggattcgagattcgatcattcggcagtggtttggatgaagaagatgcctatgatgctcccccggattatcctggcagctcagccgccgagggccgtgatctctccccagttcctcccaagcccttttcctccgcaccccgccatcgcgagtcgctcgacgaagagacaatattcgcagtcggcgaagaggatgctgagaggtggtctgatgatgaagagtctcctcgcaattcaagcgagagacagagactcaccggcaaggacaaggattaaactgaacattgactcgtctttttttttaatacggtcgttttccctggttagtgtaaaagccgatcaggaccagatatctggtagattgatggggttgtcatttcacttaatgtacaacctgcctccagggcaaggatgcaagcatatcatggcgttggtctttgcttcacacttatgtcaaatacttagttctcctagctctctttttatttatattattggcttatatcgtgttgcttggccacgttcttggatcaagttaataaaatagcgcaggttacatctttgtggctatacggtatgaatttatccgaatccgaattcaaaacacagcccactatcactgtctagtatcattctcatttcttttgcaactccaaacatccgactatggatttcgatcatattgctgagaataagaatgaacagaaggctactatttggttgaaactttggtcaagccgaagcccagaaatcttgtctatacagcttgctaagaagcatcgcctagtaaacctgcatctgcacacaatccacgtcgctttcatgaagctgcagtaccctgatttagcttaagggcaacctgacctagtcaaatagtggatttacctcgaggacataccttccaacagttcggagtcttcatagtaataaccgcagcacaatgtcaaatcgatttaccaataacccgatgtatttggccaaggatgatatccgagacgttatattgagaaccctttgaaggggctttcttgtctttttaggtttttttatagctagaaccttctataactaaggttcgaacctggaggccctggatttgagtcatccggagagcctcaagtggacctcgggagccccagtctctctcgtctttcaagatataaattgatcatttcagtataccatatttccaagctgaacaggactttgaaatgttttgactacataagaaccgataaaagcagtcttatcgcacttgccccacgaaccatcaaaacaacagctccgactctcagacaacacacacaacaacattagcagacgcctcacctgcatatgcaaggcaatatcaccatcttcaaacatcacatgcctgtagccagtgcctaagcacacacaatggcatccgagacgcatccccacgtccccgcaaacccatcctccatttccgacaaagaaagcgacaacgacaacgcaagcacagccaccgcaaagccagaaccccaaacaacagaacccagctccagggctagcacgaccctctcagcccagctgaatcaagaatgtaacgacctactctcccagatcgacacctaccaatccctccttgcgaccacgctacggaacccacagcttgtcgaggtgcgccaattccgctccagcgtagcctccgagctgaggatgctggagaagctaggacggcagatcgagggggcgattggagggacaaccgcgggaccggaaacaagtcgaatggaagatggggtgacggggtcgcgtgatcctgatttggaaatgcggcttgtgcatgcgcttcgctcgtccaatttgccgttctaccaggctgtctggaggatcgcgagcgggtcttgttctgggttggttgcgctgggtaaaaggttttactgggatggggagacgaaggcgacagagaggaagagtgctagagggaaggggaaggggaagggtgagggtgctgcgcagccagagaagcagcctaacaaagataagcgcaagagtgtgtttgtggatattgtggctgacgatggagaggagtgggtcaaggtgtctactgtctcggagagccggcttttgttcgagatggcaaagaagggctgggagggtgatagtgatgatgatgagtggtctgacggaggtaaaagacggactattttgcagaattttgatgaagatgggaatgaggatgacgatgatgagttagagctcattaaactcgcccgggatctaaagaaggcgtctgacgctacgcgcgttaaatataaacatcctcggctacgggttgttatacctaagattgaagagggaagtgttcctgagattgatgctgtcttgaacgagatgcggagctatggtattcgggttgactgccaggggaatctgccagcagagactcgcaccgggctagaccatctgctgcctcaaccgttcaaaaacttcacttcgactctgaatgtcgactgcactttactccttgccttggtgtctgacttgtctcatatcaaggacatcccgccaccaccctatgtccatagagccatcgttcgacaaatcgaagttgagcgggaaaaaccactgctcacttctgagctttggccggctatggatggtcgcgagctcgtatccacgacagaggctgcagtgcgcttccgggaaattgtcggaatcattgggacagagacggaaaagagccggactcgcatgttgctgggagatccaccatacgaacaactcgatcgtgaggctgttctccagaagtttcaagaattgtctgattatcaggtgcccacaaattggaaaatacccatcaaagtggttgcagcccagccagtcattgacgcggccaagacacaaggtcacctttatccagtggtacatgaagttggacaaggcctatcggacatcaatcagagcgtgtttttgtacggttgggtcaccggtttgacaaccatttccagcaatcgcacaattgacaaacaaatcgaggccaccgttgaggacaacaggaaaggcgatgatgacctaagaggccctgacgtttggatctgtgacacggcacgaagtttggtgggcaaggacaaagatcgaaaagtataagcatagaggttcggtcatctgctagacggttgggatagaaggcgcttttcttgacgttgacaatttctgaacatggtgccattgttctgctgggcatccaatcatgcagtatgttttatacaacgattggctgagagtttgagagaaaatcggagaacttggtcctttccatcgcgctatcagattttatttacttctctgaagatttgccgtggtcgtcagggacatagaagatgatttccttgtcggcactggcgatcatattgtaacgcgggttgtattccaccatggccgcgcgatttggagcagacaacctggccgagggctgcagtgtgatgtccccccgggcgatctgtcccaagtcccacacgagcataccgtgttgatcaccattgcctccaataacgtatcgaccatcgggagtgaaacaggcgtcgccttgtccgagcggcttgccggtcgtagacaccggtgcagcacgaccagatgatccactcttgccttctaggaaagccttgagtgtaccatcaaaggcatctagaataaagtgaccatggtagtccgttccaagcatcaaatattttccatcattggaaaactccaatcgagtccatgctcgtcctcgcgttgacggtgtgaatctctcctcgtattgtgcaaggtcgaaggtggagaagggcgacttgtcaaagttgcggaagtcgtaaagaaggattgaagctgtggattgagaggcgattgcaatgactgtacccgaagggtcaaaggcagcaaggtatggtgtcgcaaggttgagctttccctgcgggttcctggaattcaggtcccacaatgtcacagtatcgtccttggagcacgacatgaaggcgtcgctggccggggattgagccagacaagttacttggtcgttattgccggtgaaatatcgtatgtatccctcgttgtgaagatccagtagccgcaaattatctgtcaatggtgagctgggtagccaaaagcaaaggcattcagtcgcatactatcaatcttggtactcgcgtgaaggacctggcgagagtgatgggtgaatcgcgcaagatgaacaccgtatttcttgctggcaaccgatttattgtatttgccctctttcacgtcataaacatgcatactatcatcgttcccggctccgatcagaacgtcgccctggtcatcaaagtccaaagaggtcacgtatttggacgggtcttttttacaagggtggaacccctacagaataatcatatcagaatggtgccacagtcccaacattcaattggacataccttggatggtctgaaggtgtcaatgatatccgtgattttctgcgacttgaggggagcttgggcggggaccggaccctgctgaggtgttgattggctttcagccatggcggtatggtcggtgaagggtccttaagatatattatatgaaggaattgcagattgcgaataataagagcttgacgggaacgtgaaaaagaggcaaaaaatacatagaactgataagctccaaattgaagctccgcgactgggtatttttgcgcgcctcaccgcctcggctgacataagaattccggggccgacgccggaggccccaggctcaattgaccaatgagcgtttcaccgagtcccagttcgccgcatgtaagcttttatgtccacggttatctcagggcgcgtcttgactcaacttctgcaatatctggccctaggtgaaaatattgtgcattcgttcatattactcacctatacttcaaattgcgacttggctatacagcctcaataaattgcacatatcccgtggaatctccgctactggccgcatttattttgtccaggtccgatattcctccgctaaccgacaaatctgcgcaagtcacatataaggcgctatgtctactactgcggggtatgttatgtctaagtgtgggatatatacaaagcctgcgctaacagcaattgtggttaaacagcgcgttcatcgcaggtggcattgcagcatgcggtgcagtcacggtcacccatagtttcgagacggttaagattcggttggtttcctgatactccggatatgctaccattatactgactataattggttccaagccttcaactgcagggtgaattgcagaacaagaatcaggcagtgaagatgtacaagggccctttacacggcatcaaagtcattttacagaatgaaggacctcggggtctgttccgaggtattggatctgctgtatgtgatgtcctctccaaatggcatataaagacgcattgatctaacattcaggtcatgtagtatatctaccaggtcttgcttaacggctgccgtctgggcttctacgaacctatccgcgcaaacctcacaaatgctatatacaaagatcccaaggtccaatccctcggtgccaatgtcgttgcaggagctgcttcgggtgtcattggtgctgcagcagggtcgcctttcttccttgtgaagacccgtcttcagtcctactcgccgttcctccccgtcggcacccagcacaactataaaaactcctttgatggccttagcaagatctacaagagcgagggtattaggggcatataccgtggtgtcgatgctgctatgatccgcaccagtttcggcagtgccgtgcagctccccacatatttctttgccaagcgccgtttgacccgccacctgggcatgaaggagggtcctgctttgcatctggctagtagtgcagcgtctggatttgttgtgtgctgctgcatgcacccccctggtatgctatcttgaacatggggctatacgttcttcgctgactttcactctagacacgatcatggctcgtatgtacaaccagacaggaaacctctacggtggtgtgtttgattgcttgctcaagactatccgcaccgagggtccacttgccatttacaagggcttcttcgcccatctcgcccgtatccttccccacaccgtaagtgacaggagttgagccttgctttggtattattcatgtactaaccccacttctagatcttgaccctgagtctggctgagcagactaacaagctgatgcgccgtgtcgagaaccggatcctgcccgactctttccgcgagggaatctaagcaccttatgggatatattttgaaggggtcttcttgcgagatccattaccagtgtatgcattgcctggctggggtttcttttcgaatgttctgcaccgcacaattgcttctcaccgggaatatacctggcgttcggtagagtagctgttgatttcaaaattcgcaagtctgtacatattgttcttcgcatattgcaagcattggaaattcctttcgggtatgtaccttcgcattatctgatcccccactgttggtttccccggtacagatcgcgaaacacgagaacgcgctagcacgtggtgatgcaaggcacttccctgctagtattcccactagtccactagtctagaggtatgtggggttgccagtgcatccagagctcaaacctggcaggtggagatatctcaatggcacttgcaagggattactcgccacattgcattcgacccttgggaacagtgtcaataaatataccgtacaatatagacgactgtggtccttgtactccgtactccgtagatattataccaatctgacttgactccgtaaaatggtcaaacaaagacccctaacgttagctgcctaagcatgacgcagctaagatgatcggcactttccttttcggtccactctaagaaacttcctatggggtaaagggtaaacgatccttcattcctgagacttgacaggagcagccacatcttgctcgctttgtttgaaatgctatggactacctaggcacatcatgtatcaagtcgagattaacgcttgagaataacccctggaacatgttaacaggtacagcagatggaacgcgtgtgtggagagttgagcaaacccttacgccatgaaaaataaactaaaaattggcaaatgagatgctaacgccaggatctagaccaataaccaaaccaattagatccgtaaatccggattgttttgctagtcgcgtcgcgtgtttttgtgcccaagtggattgtctggcttatctgatcgtgatcaatagtggggaccgaaaattggagacgcgtgggagttgttgatgtcttatatgtaggtttatgaagctacataagtagtggctggatactgttatatggattggatattcactattatgtatgtatcagattcgagaaggagtgatatacagatgtagataagatcggaatctacaaacctacaaacaaagtactacaaaatctatattcacatgcacaagaatggagctggaatggagctcggccaagctcggccaaggactatcctttcggatgtcgctgggatccaagtggcatgagaaagaaatcgcccaaataggaaagaagggctgggaaaaacacgcgccgtgcattacctaagcggtgcgcgcggtcacgtgcgacgtgacttagcacgtcgcgctaaagagaaatcggcagtacttaatcgagtttctcttccctcgtccaactccaaagttccaatcccactatcaaggcttctgtctcattcttacctgctgcctttgttctcaataattgttcttgtgatatcacatttctcacataattgttccaatggccgctcaagtcactccctcgaaacaggtacgtgatgtcacgtctcttgcctctcgcctctcgcgtccgacgcgtcgtgaagttcgtttgagctaacatttactttttcttaggctgcttcctccctcgagaacctcaagatgagcgattcacctattaagaagctcgacttccagtcgactggcaaagagaacgcgcccgcgtctctgaagcccgtcgatgcccccattgagaagcccaccgagaaggctctcgcgtccaagcctctgaccatcaaggagatggaagcgacagagcccctcctccaggagaacccccaccgtttcgtcatgttccctatcaagtaccacgaggtaagtcacgtcgtcgacgcgtcccacgcgtaaagtggatatcgacaaagatgttctgccactgtgaacattgaagctaaccgtatccctcatttcacagatctggcaaatgtacaagaaggccgaggcttctttctggaccgccgaggagatcgatctttccaaggatcttcacgactggcacaaccgcttgaacgacgatgagcgttacttcgtctcccacgtcctcgccttcttcgccgcctccgacggtattgtcaacgagaaccttgttgagcgcttcagtggagaggttcagatccccgaggcccgttgcttctacggcttccagatcatgatggagaacatccactctgaaacctactctctgctcatcgatacctacatcaaggagcccaagcagcgtacctacctcttcgatgctattgacactagtgagtgattctcccattgacttgatatttgtccaattgtctaacctggcacttagttccctgcattgctaagaaggccaactgggccctccgctggatcaacgaccgtgagtcaaccttcgcttcgcgtctggttgccttcgccgctgtggagggtatcttcttctccggctcattcgcctccatcttctggctgaagaagcgtggcctaatgcctggtctcactttctccaacgagttgatctcccgtgatgagggtctccacactgactttgcttgtctgctgttctcccacatgaaccaccgccccgaccccaaggtggttgaggatatcattgtcgaggctgtcggaatcgagcaggagttcctcactgacgctcttccctgcggcctgcttggcatgaacgccaagctgatgtgcgagtacattgagttcgtcgctgaccgcctgctggtggccctcggcaacaagaagtactacaacgctaccaaccccttcgacttcatggagtccatctccttggccggcaagaccaacttcttcgaaaagcgtgtcggtgactaccagaaggctggtgtcatggccagcaccaagcaggaactcaacgctgagggcgagaaggtctcaaacgacggtggtctcaacttcgatgaggacttctagattaagtccttctcccttccctcttgtgttgttttataccctctcccctttcacgtgatattatgccgttttgtctcttattgattgatgtaattcctgtttgcaggctcgcatgggaatggtgtttcttgtttttatttttcctggtctatcctgggctctggtgcccatggatgaatggtggattctctgtatctagatcttcgaatgactccaatgtgtcttgatatatgtttgtttgtatatgtaacataacatattaatcctcctaaatatacgttatcaattggctagtcccatcccatccctacttcacactctattgaaactctatgtatctcaagacctcctgtggattttgccctaactcgaagttggtatgtcattcccgataccgaaagacctcaatcccatatctatgaatgcatcataaaaagtaataagcgaaaagaagcataacaaacaaagcaatgaatctcattcaaaagaaaccagttgatttaccgcttccccttcccgcccttcttcttccccttcgcactctgtccctgcgcctgcggctgcgccttactggcaaccggcggcgtcgcaacctcctcagcaggagcatcgaccatatccacatccgcgccggcagcaggcaccgcagccgataaccccaagcccgctacatcagcaccggcagccagcttgcccagacttgtaatcagacggccgacttcctgcgccttgtttgtgcggtagtgcaggcagattccggtggttgggttgaatgttttcagcgtgagggttgcgattgaggtttgtgcgggtgtggtggtggaggaagcatcggtggctttggcgttttttcggacttgggatttgtgggcgcggattacgtttcctcgtcggtttgtggggaagttgtattttgttactatccgggtctgggaggtttgcttgttagttaaatttggatttggattggggtttgcggttggtgttcattgttgcccgctgtgggggaacgcggtgtggaagattggatggtgggttgggatagagggttctggtgcttactgtctctgggtacgcttgtaataattgcgcggactgttccaggtaggcctgggaggtggataggtagggcattttggagtagtggtgagcgtccgtagagctcgtggttttggagttgaggtgtggtgggatgcgcagattggtgggtgtttctcttggtgtcgcgggtttactcagaatgagatgtcgcggatcaaaaggaaatgtccgctgagattcaagactcgagagagaaactggttatgaaagttggtggatggagagagcgtggaggtgttatcgttgtgctggcggctttttccatgtcttggcatcaatacgttcactccgcaatttataggaaccactctaaccaactagttaaccaattctcttttattatcctatacgatgtgcattacttgagatctaattaaatacgattattggacctaacgagagccatcaaccacatctacttcattaggctcagccaatttaccgaagatcgcagcttgtatctcataaaccattctgtactaagtagcttaccctcgaatgtaagcgtccaagtgaggtgactaaccgcgacaaaccagagatcatgcaatttctgccaagccttacatagtggaatatgcgaaacatccgtcctgttgtgctagagaatgcctttctcctctattattacatcccctcaacaaggcacggagcaaatcagcttgatacctttcactctacacgatagataatcgactcatgtcacaaaatgcctatgttgagcctgtgttctttgtaggctatagtaagctgcatcgctcgcagcaaggccttaacggcgcactagagtggccgttgttgagggacctcgtgggcaatgtgcaaggataccaagtgctcgaccttggatgtgattttgagtggttttctcggtgggcacaagaaaacggagcttaaaaagtccacgggatcgatatctctcggaacatgcttgagcgggcaaagagtttgactgtacatcccgcagtcacatacagtatcggcgaccttgatacgatcgagttggaaaagaacttatatgacttggtatacagctccctggctttccactatctccagaatctgaaggagctctttggacaggtctacgatggattgaaagccggcgggcatttcgtcttctcggttgaacatcccatcttcacagcccctattattgcaccggcttggactgaaagtgctggtcgaacagcggcatgggctgcagactagtacgctgaagaagggcttcgcaagagggactggcttgggatggaagtcttcaaacaacatcgcacggtggacacacatatatcattacttctgggtactgggttcattttgacagcagtcaaaaagtggatgccgactagcgagtatattaaagaccatcctgagtggaaaagggagcgacaccatccacttttccttgtggttggtgcacgaaagcctaagggagcccaaacttgattcgattccggaccgacggtcaatgtctttatagggcttggttcgcaggctgggaatgcgtgagagaatgcgaggaactcccatgcttggaaaactatacaatatgccatttacacgtctcatcttccattgcatctggtactgtacataccctgctatcaaggcctaaaaactatacacattaaacacatatcgacatcacaaatacgtaaaacaaaagatcaacacacccatcctccaatcctccaatagaatgccaaacaaaacgccaaaacctaccatacatcccagaaaatcatagatcgtacattcgtagatcgtagatcatacatgcatcacatacatcgaaaaacaaagaaaaagaagaaaaagaaaagactcaagaaatgggccgatggcactccgaacaaatcagcttctgtttcccatccctccccttaacactgcggaaacttgtcccacgacagttttcacatttgagcacgtcttcctctccatcacccatcgaagaggaatagttactactcaagatactacctcctgaaatactcagcctgcgctcatgcgacgggattcgattcggactgaggaagtcactcggtttccgggactgcatggccagtgcatcgtgcgtgatcttgttccagtacgcgtagctgcggtcaccctgtatccagagtgggttgtcttgtgaatcagtcgcagctaggtctgccggggcgaatttcaagtggggttggggtggtggttgcggcttggagtttgaggcatttgcatggctgacatcttcgcttgtgcgattgctgtcggggtgtggtcggcctggtgatgggggtggagatgtagtgaagatggacaatgattcgttccggctgaggcttgaaggccggggcgatgctagtctggaaagggatgggcggttctggggggatggggtacgggttcggaagtcggtgcgggagccatctgtgctggagcggccgtggcggacgacggagttgcgccatgagacgatgcgctcggatggagttttgtgggaggattcctttccgattgaggaggcgatgctacggcgtgccgaattggagcgtcttaggatccgtcgtgagatggtggagttggcgttccaattctcgaagcgtcgtttttgatacgcgcagtcttgccggagaactttgatcttgccggagtagtcggcaaccacgattatctctccgtctggatgcttggatcgtgcgaggtacgagggtgaggcgtgggccattttgctgatgatggataggcgaggtgctgattcagagtgtttatgggatttctttgaaaagtctgttgactccggaccaataagggctaccgggggcggattgcagatgtcgtagattgggtcttctgatagcgccaggacctctttcgtttggttgggtgccattattgcagctgttaccatggcagactgtgtctcaaatatctccacagcctgcttttcggaatcctgttgcacaggcccaactggccacacgtatgccctgcgatcctcactcccacatatgatatacttgccatcattggtgaatgaagctctaatttggctgcaggtgttctcgttgccgcggaatttagcctgcaacgatcgatcattgaagtcgtacagcctgatgcgggagtcgttgctagtaaccagtaacttgatatcaccatcgtcatcatccttggggttgtccttgggaaccattatcgtatcgactccagtgattttactacctttggcgttgcgtccacgggccgatcgtacatgaatctgggctgatacctttaggccctcagtgtcatagatgttaagcatgccattcaaacatccggcaatggagtatcggccgtctggagtgaatgccacagcagtaatcatatcaggcacagtagtcacaaaagccacgctcttatcgggtatactccagagtcgcagtttcgtatcgagagatccagcgaggaaaaagcggtcgtcacgcgggtggaattggatcgaagtcacaaagtcactgtgctggaaacagcaaagacattccggtcgagagatatgccacagtcgcactgttttgtccattgacgaggagagaatgaagttattctagcgcacacgtcagcatggacgcttcccatcgtgttgaatgttttgagcatgcatactttactccagctcaggtctaggatacttcccgtgtgtccctcatacacctgggcgggctccggctggaacacaggtgccttcaggccggaatcgtcttgtgcatctacgggtgttgccttttcgtgctcattggcatcctcgcgctcctccggtgtagcgataacagtccatactcggaccttccggtcctggccagcagccgcgagatatttaccatctttagagaatacgagtgcccagacggcccttccgatgttgtcgccattctgtagcaaggccgaggacgtagatatccgtctatctgcgggtttgggcgatgggccgctgccctccagttcctgtgctagaaacacgcggtcgaacgtcttctcttttttgtactgggctcgcaccttcagatatttcgacggagcagggtgtcgaggtatgaatccaattggatgatgtgaggtgtccatggacatgcggggcgtttcagattccgaggtctcatcttctacctccaacaactgatcttttttcttgcctccgatgattcggctgaggaaggaaacaccttttctgtagttgagaagagcaaaccacgggtcagtcgctggtaatatcacgtatattgttgcggcgagaatcctggggggaggcgaaaagagactcccggcacacaagtgtcggcgacacaggccgtcgggcgtaacttgtgtttccaaggcatggcaaagtctaaaaactcacttcttctctctaggatgtttcgaggtaggcaatgcatctcctcgtatcgggcttcggtctccctggccgtactcggagcccacagcctctgcttcgtatgacgcttttcccagtaacttcaggggaatggacttttgggtattggtgcgttggataatgtgctataacgagagcacggccctcctgtcagcttggctgcatcttcgtatccgcatctccgatgcgggttgcacaaagcaaacaagcacatgatcggtccggaagtattggccaatttggtgtggcaagtctcctgtgagagcttacctgcgatagcggatctatagcacttgactcggtcctctcgtgcggggaattcaaggtcgaatgagagccaccaatgactgcgcgtttggtatttcgaacatcgtgcagactatgagtcgagcccgaggggacatccgatgtggccgaggctggcagttctgtcagcgtctttccataagatttttctgttctttttcgcgcattggagttctccagacagggaccgaatttagagtttggccaagtctggagattcaagattcaactctcgagattcaagtctcaatattcaacttgcaaaatcacacttaccgggaaatgtcgagtttccggggctcaaatcggctatcgcgggggtcgtcgcgactcggagttgtagattgttgcttccctccgccatgtgttcagtcgcatgaggggtatcaggtaatatacaaatgcagatgtatgttcacagagacttgcgattaacaaaagaaagaaagaaaaggaagtaaagcggcaacgaccggatagcgctggatgacatcaaattcggggagatggggtggagacttggaccctccagggtttgcttaattgcttactgagaacgttaaatggagaagatgacagttaagagtatggaatagagaatagagaatagtaattatattaaatgcgcgattgaagctttctcacacggtcctttgcaatatcacacatacccttcaaagtcagtacatacatccagagtaagtaactcgataagaggacattacctgaatggtctcttcaatctctttctccgcattagcccggtcaatgcgctcgcgcatctcgaccataatcacgtcgcgattgcgcccattgacgaacgtgctatacatctcaagtcaacatgtatagatcactgcgcaagaaacatggacctacacaaaccgcaaccctgggaatttctcctcgtattccgcattgagtgctcgtaattgctccgcttgttcctcggcgccttcattcaattgggcctgttcctttttgctcagctcgctcagatgttccggattggctggggctcggccaagacgtggatgcgaccccaaaatgccaaacagtacgtctcggtcggtaggtgaatttgcggctgagagtgccgacatgcgacctcctaccgcatcgatgagggtggtgtatgaagagaaggtctggttggccagcacgggaatcatcagtcggtggagctctggagagggttcgaagagggtatcgagcacccgaagctgggcctcttggggtagggaggggatcgtcgacagcggggggagttcggccatggtggtttctatgaggatatgtatgaatatgaagaagggaatgtattgcgattaagtataaaagagatcgtacccgctttcggaggacgccgaggcggagaacagcgggaatagtcgatgtatgtatcctatagatgtgtacatgtgagctatggagactggaactgtttgtttaaccgtttgactatttatatcttagtgtgtttcatatgttgagtttaacattggacacctcgcattccttgaacacccaatcattccaacaaatccaccgtatacatctacctaatcaacaactgcactctattgaaacctgatacattattaaattacgccaatcaaaggtggagcccaattgagaacatgttccccctgagaccagttcgcctaaaccaactttgtttttatgaaacagccgaatctgcacctccggccttgattgggcacatcgcgatctaaagatccgatcccaaatcaactcttagtgtctttacccgctttctggggccacttttccctcctattctctcctcttcgctttacctttttgcgcctcctctggcccttctccatgcggctcacgctatgtctttgaatgggctcgatagtgcccccgtcgtcgaagcctaccaaagtgccctggctgacgcgggcgggtggtgagtaccccctttcggtgtttcaacgcactgtgcgacagatccattaacttcacttcactgacacccctatgtttcaggtttctattacactatgttgcaagagatgaggttgccctccacgaacgaggcgtcggcggggtgcccgaaatccggaatgccattgacggctacgaggaatgctcgccgctctatggcttcctccaataccggcgcagaaaagtgattatccgatacatgccggagggattatctcggcttatactaggtatgcccttcgctgcctttccataggaattgatctaatctgtcctagctcgaagcaatgtccagttccaattcgtgatcgacaagttcacccccaacgacaccatacttcctctgtccaaagcctccgatctcaccgaaagcgccctgtcctccgcttgtctcctccataccgcgtcgacctcaattacctcttcctcaagctcgcttcgtcgccgccgactgatggaaatcacggaggatgccgaggagaacggcacaaaggatgaagctccgaacccaatcacacatctccagtcggaggcccgacgcagaccaaggagtgtcaagtcggaagctaccttggtgccgtcgccaattgaacatcccgtggaaccggaactacccccgatatcaccagaaagtgaaaaagcaccagtcgatctcataccacccccatcccgatcgagctcccgagccacactctctcgagggagtcccgtcgaaccacaatcagcgacaatgtcccctaggtccataaaatcagatcgctcccgctccagttccaggtaccgaactatcttggatgaattcccccgtccttcggaagaggcccggttgtccagccaatccagccgtccctcactccgagatttggaacgagccgcgggatatacgccaaaggttaagctgggaccccgaccgtccgtggatagcagtggtagaccccgcacagcaggcagttctcgaaatttagaccaacgtcctgttgcatccctcccgacaaatatgcgctcatcttccgtgcgaaagcaaaacaatgacgcgccgcgccctcgatctcaggggagcactttcgcaatcaaacccactagtcgtgttccaccagtcccccctttgctggttccacccccctctatccctatttcgagacctcagctttcccctggcgccaaatccctcggagctctgtcgacctcctcgggattgacccctgagaaagaacgtttgatgaaggctttgcagcaaagaaggaagaatatggccaagcgtgcggaggaaacgaaaaagaagcaggcctctgaggaagggctcaaaccagtgaagcatatcgccaaggatctggatgccgataaagagaatcttattcagattcactatcccgattctgaaatgatgctgtctgagcccgagacaatccaacaggatcaacaggagttaccttcagccaattcacccgtgcctcctgactccgcccctgagcctgcctccgagtctattcttaaacccgcgttcgagcccgttcatgattccactcttgaacttgccaccgaacctgttcctgagagcgttattggatccgctcctgatcctgtcgtcgaggaaattgctgaattcagtcccgacctcgctcctaattcggttggatcaaatttcgaagctgtccgtgaattagtcgccgacccaattgttgagtctgctgtgacgcctgagccagagcagctttctgggcctcttgaggctgaattaaacccgatcggtgatatttcccctgcaagcgctgaggatgggccatccttacctacggcctcaagtaccgacagatttatctcagccgatcgtgctgccacaccttcagagacagttaaggaggaaacaatacagacaacccctgaggatgaaacacgcaccgagcacgaggactccgcaatctctggtctcgccccacctacctttaatcccgacgtcccacttccttcggatgccccacgagattcaggggacgtctccgaaacacatttcgaaatttctccagctgcatatgtaccaactgacgagccttctgacgtgcctatcttagcagaggtccctcaggcggttcccctcccctccgtcccctctattacccctctagagagcgttggcacggaaacaccagtcgcccccgtttttgtctcaatcgaggtggacgaaccgacccctgatcgcctagttgccgagatagccgagcctcttaccctggatcagaggcgtagggtccgcctggagcctattcaagtgcctactctagatttctcggacgacgacaacctcctttccgacgattcgtttatggaggaattgacatccgctactgtccagcaagctagaccggtatctgtgaaatctcccaacggcgtcgatcacgcctggaaaaatttacgcgccgtctctagcccgttctctatgggggcatcgtcgggtatgcaggctctagcagtgggccggtccgtttctagctcccactctgaaagtcgccctactacgccggttctcatggccaagaagatcaacgtctcctctggaatttccagtcgtatcaaagctcttgagaagttttcgagccgcgaaggcactcccttgggtgccagtccggctgtaagtgcgccgtcggcctcgtcgtctttcgagaaccttcggaaacgcgcatctatctcattgcccggtgggaaccacgaattcactccaccaagcacaatgcattctgctcatgtccctgagagcttttcccgtgcgccgagcttaagtcggcacaaccgtcaggtgtctgtggatactgcgcgacctgctagctctatttccgtgacggcccgtatcgtgcgtgatgcagatatctctcccgtgcctgctggacctgagccctcggagaccgatgttgtcaacccccaggctagtcctgtgactgtggagcctgagatagctgaggcaccactccctgagatctcgcctatcgagcctgccagccgtccccaggaccgaagcttgtcaatctcatctactacatctaatcgccaagcgacatctcgccctgaaagccgtcccggaagccgcccctctcccccctcgcgctctaggactgacgacagcgtccaatcagtctcttcgacgcccgaagataagaaaccatctcgcacttcgcgactcatacgccgcatgtcgtcgatcacatccaactctcgccggagcattatcggagcgctcagctcgccagtcaaggaagaggagtatgttcccaccctcacaaatgggtcgagtaaggcttcagagtctactagctcgcgtacctcagatgctattgaaattggcgaggtgaacgtccagttcccagaaactcttctatggaagcgtcgggtcatgcgcatcgatgaagagggatacgttgttctgacacctggcaccaatgatgccaccacccggaacatgactaaacgctaccatctcaccgagttccgcactccttgccttcctgatgaagatatgcaggaactaccaaacagcatcttgcttgatttcttagatggaaatacgcttcagtgtgcttgtgaatccagacagggacaggcttctgctcttcagagtaagtatcccttgcattttcttcgaagttggagaataaatagctaatcatctacagctctcatcgaggcccatagcgcccaccagcaatgatcctcacatttctcaaatgacaggactccttataccgatactcctgtctcccatttccattctcttctgggcgtcgcccacccttcctttggctttaccaactacacgcatctgctaaacctccttcgacatctatttcttatctcttctacaaccccctctgtacctctatagcttttctctgtcttatctctctcaatctggtgtgtatgtgttgtgatatatgtggcgtgttcttggtataccccgagtcaaaagagcttcctttttcctttcccacttctcgcaatgccaatctactgttctttgccatgtacagacagacagacagacagtatttctttgccgctccttttgcttgcctttcttaattgactttgctcttgcatacacactccatgccttcgcatagagtgttggtgttctattcaatgcactgtgttctcttcttctcttggtttacttctagaagctttatattctaatctgtttttgattgctattttcgtgcatgctaattttggaatgtatctaaaaggtttatttgattctcttcggttctgcgcgcgctattcaactaatgttcaaagcttgtgctggctggtagtgatacggtggtgtggttggtttgggagaagacaagtagacttagggagaatatctctcgtgctattaccagctatgtggttctacctacttttgggggggtatcaagtggaagcaatccgaaagaatcgtcagcgaaacatcgaaccgctagggctgtgcacatctagcaaattcatgccgcaacacccttctaacacccaacgcttatatatctccattgctaagctaagaatatagccacgggatatctgtagggaaataaaatcgttagacggtgtatcttgacagccgcgaataagaagtaattcaataacatactagagaggagggtatataattgtggcgctgtgtttttctcatccactgttcctttcaaaatccagcgatatgagattttgattgttcaacttttttttggatttctgataaacgtcatggctcataacgatcgttaatttcatgaagcgatcaggtgtaaccgttcgcaaggtcctcgagctcctgatcttcatcatcctcttcatcttcgtcattctgctcttctaatccctcggtctctggaatggatgtctcttcatccaggggatgttgaccgttttcagtcgtgccattctctttatttatagaatagaactccgggaatgcagtgcgcatttgcagcacatgcgcatcaacgacgtattgcatgaggttgttgacggggaaggaagtatgcatgcgtttctccgactccatcagctcaaccttcatctgcatctcccactcgtgctctccggcatggtccccaataatcttcttccgctcgtttttgtcggtggtcgaaaccaccttctcgcatccgggcatgcggcatgtccaggtatcagatatctcgtcgatgaattcttcaatttcatgtggcgtatctggagtgggattccgctctggagtcagagtttggcgtgatggtgacgaagatacggggggagtctggagtttatcttttttgatattgtccttgaacaggctctccataagagaggagccggcgccggtcgaggaggctgcaaagaacgagcgagtccgaggctttgtggctgagaatggatctctgattaattcatagccacgcgttttgctcggtgtttcaatttcgtcgatgtcgatttcatcggtatcctcttcgtcttcctcgttggactcgactgtttgctggtttgcgggggcattgcgatttcgcttgccggtcgctttattggagactgtgtggactcttggacgcagcacagacttctgggtccggccgccttgttcatcgtcgctggattcttcctgcgaatccagaggggttaggagtgcagttggcagaggggcggatgtcgtggatgcatgtgtgagttccctatggataacatagcgagaccatctaaagtcctcttcatccatcatttcgagcacggcgcttgccctgaaggcaatgattttctgggcgtcttcgttgctgagagagaatcgttctgcaaagcgttctcccaggaggtcaatatgcaggcgacgctttgccaagtgaccttcttctctaaggtccttgagcagctggtagatggcatcggcttgtgattttgagattgctgcaggctgatgccgtggagttgtcacttctggttcatctgcgggctccgtttcgctttcctcggagggctcaagctcttctaacagcctattatactcatcctaagcttattatcagtatgcacagaggctattgtaaggagacttctttccttacattaaatcggcgacgcagatggacgaagacacttgtcttcttccattccacatctgaatcaccttggatcatgcaacgaagcaagaaggaagcatgtgtcccaaagacctcagctgactgttctcgggtctcacatgagccatatgtatggtaagtatactaaggagggataaatattaggcttcggtttgtatagcgcatagcttagaatcgaaagactcacttgttcgcagagactcctaaaagatggattgatctgtctctttccttgctggtgcttatcaaccaagaaatacagcaagtcaatagcctggaccatgcgattgtatgtgggtgtgaaacccttggcgggcgaaatgatgtcgtaccagcctgccttaccagcaacccaaagctcaatgctcttgtcttcagtttggccgtaggcatagtgtgttacttcgtcaataataatgcgcttaggagggttatccgggttgagcactggtgggcgagtggctggtcagcaagctgcttgataaacgcgcattgatacaacgatacacacctaagtgttcctggtcctcatgaagcggctctaagcagccgatcacctgcactggattttgttcggtggcatccagtagatttgcatatagcatctttccaggctttaggaccttcacatcggtcaggctgaactcccaccaatcgttctcgtcagtaacagagggattggtgggagctaggacggtttcttcgcgggacgtcatggtggaatgggcatggtgggtatcgacaataaggtatggaaaagtgttgatatatacgtaaggtcaattaactgagaataagagaataagaagaaggcgacttggaatggaaccttgtagttgtcaacagtcaaagtcgtcgaccgccagtaaattacggatacaataagttactcataattaattacatgggtgttctgcctggtttatcgggcatttataaatgaatccatcacgtgcacatggcataattacataacttagaattaaggttacagcggtccacggatccacggctctgatcaaaattagactccgatcggatctcagctttgaaaaggcatacatatgcatgtacatatctaggcacgccattcctagagagatgctctcggtcaatacaatactggagccgctgtgaagtttgctaaggtatggtaggagccggatccaccatgggtctaggtttgtgaccgattacgcaggatgggggttataagtggaagaatatttgatgatcaaggaataacgagatgtgtattaagtttcgatgctagacgcggggtgtggggaaagcattttttgaacgccgtctcaattaacgctttcctggaaccacaaaaaaaaattggaagactgaagccactcatttatcttctttcgagggcatccgtaactccatgagcagtgtattatcctctaggctaagcaccacattgtcagtctgtcaaaagagtattttgcttttgcatcaacgaagatcgtagactttacactgtcatgattgcatctctaagagctgttaagcagagagccatgtctggtgttaggggtaggcgaaccttgatagaaacttggcagttgcactccgatagacgaggaagacgttggctggtacagctactaggtcaaggcctttgtatttattcgctatataaaatcagaaaaatccatgactattaagacaaagtaccaatgtattccaaaggtagtcagtacggagtagtgtagaatagtatgtcaaggggtgcggtaacaggacattttgaactactcaatgggaatgtagatatcatcttggctttccctttatgcctgttattttctaccataagagaaaatagactatgaaaaatggaatctactaggacatcaaagatcaaaaaagaggcacaatgccttcaaattgcacttttaagaaacattaaaataatgccgaggcttttcatctataagtgctgtaatatctgtagatatctccaacaatgatctagaaacctgtatatcaattatatcagaatcgtagggcaatcgccttgtcagtcccaaagaactgccgtaaaggcggcagccaaatctctaccaaaataactttttcccccattttggattgactcccacctttccagatgccatttcctccaggttttcggctttttcgcaaaacaatgtctggcgagaagatccttgaaggcgtattcggtgagcttgaatcccactaaagcaagacttcgatctaacatctccgctagccgtccacaagccgcaaggcgtcacctccgccgacgtgatccgtactttgcagaaacacttcaacccctccaagacattcaaaccatggttagaagaagaacgcgcccgccgcgaccgtgagagccaattccagcgcaaacgccgtcgccaccagcgcctcgacgtcaagatcggccacggcggcaccttagacccgctcgcgacaggcgtgctcatcaccggaatcggtaagggcacaaagtccctccaggatttcctggcctgcaccaagagctatgaaaccattgtgacctttggcgcggagacggatacctacgatcgcctcggaaaaatcgtgcgccgcgcgccctacgaacatatcacacgcgaagcagtcgagaaagcactggaacagttccgtggggaaatcatgcagaaaccgcccattttctccgctttgcgagtgaatggaaagaagctgtacgagtatgcgcgcgagggcaagatgccgccgattgagattaagcaccggcccgttgaggtcttgaatatggagattgtggagtggtacgagcccggcacacacgagtacaaatggcccgaggtggagatgactggtgatgagaaggctgtcgctgagaagcttcttgatcaggaagcatcggtgcctgcgccgccggccgaaggtgacgctacaagccaagcgcccgaagcttcttctaccaagcgcaagtcgccacccccggcggatgaagtgaaggatgatggtgcggaggctgctaagaagcagaaggtgtccgagagcgaagcggcacctattgcacctgagcctactgcccccgaacctgcaactacagaggcccctgttgtgcctgcagaggagcccaagccccagcctccggcggtgaagattaagatgactgtcacgtcgggcttctacgttcgctcgctggcacatgatctaggcaaagctgttggtagctgtgctctgatgagcgagcttgtgcgcagccgtcaaggtgactacgaactctcccctgataaggttctagagtacaaggaccttgatgccggcgaagaggtctggggaccgaaggtggagaagttcttgacagagtgggaggagaagagagccactaaggctaaagctgaagcagcccaataggctatagtctaaaatgatatagcatttgtatatagacttcctatctgtaatatcatagagaaaataaatcaaaactgccattttttggttatccagacccaagcgagaaaaaataattacatgatgcacgatacaaatgcaatgtcacaacataacccatcacgtcaaaacgattagttgcgtcccttggcttggactctcttgctcttgccgggtcgctttgcgccaaccttcatcttcttagcggagaagttgctcagatcaccactggacgcggcatcaccgctcttagcatggcgcttcttgcctccgaatccgaacttggcgtccttcttctggcgcttcgagccaccggggccatcaccacggctacgcttcttgtcgggctgggtagcttcttcaatggcaacgtcgaacatatcattggcgtcgtcggtaggggcggagccatcagccttgcgctctgtgtgaaaaatcaggttagcgactgcgaaactcatagaaaaataccatgaatgaaacaaagtgagaacatactcttcttcaaggtgttgatcttctccaacatttcgcgcttctccttgtgtctctgctgcaacttggagttctggacctgcttgccgaacttcttaagatcacgctggcggcgcgcctcagcagaagccttcttgccagcagcctcctcgtaaagcctcttcttgatcaagcccatgtgctcgtcattcttcaccatctctgcgaagtaatcgcccggccgcgtgaagggaatgccatccttcttcagcagggcacgtgcttgggtagcagcaatctggcagaccttgtagaacgccaattcacggttcaggtcgtcatttgcgtcttcaacctcgatcggctctttcgagactaaagagttgtgctctgagaatggggtgttgggaccgatgaacgagatgcgcttgagggcggagaggatagcggcagagttgttgatcgtcaaacgttggtggggaacgacatcttcacgctcatcttcctcgaggtcggagagtgggatgtcttcttcctcttcctcgtcatcttccatctcctcgtcctggtcgacctcttcctcttcctcttcctcttcttcctcggcgccagagctggcggccttctcttcctccttctcttcctccttctcttcctccaagatcttgtcctcgggggcggcagtagccttcttggccttctttttttcggcggccttgatcaatttcttctgcttctcggcctcgaaatcacggcccttgtgggcatcgagagcctggagtaacttgctgcgcttgaccattcttgctttgtgttaaaaatacaaagagaaaattgtattttgtgtgatgtgaaaggaattgaaaaaaagaaagcgacttggtatcaaacccgcatcagagaatccacgggatttttttgaaatcgcgccagtcctgatcaagctagcgttaccgataagaccaagctagtccgtaagtggaaatatttcggaaatacatatgacccgatcccttatcgagcccaccgccctcccctccctctctacatgcctcacagtctgtacagcgaatgccatagtctcacaatggccgacgaatccaagtccccttctccagacaagctagagagctccctaccagagggtaagtctcttctatcccaaccggtacataccatcttcaagctccaaactccacctgtcgctcttactaaatgccatcagaactccgatgctcaaggccagctcaccgcagctgtggacgatctgctcaatgagctacaaagcaaattcgacaatgtctctacggagatgttcgggaaacgtgagttcctgcctcaatcgtcttccaccaccgccaatacattcatacctgcgaatgtgtactaacctatgtacatgcgcagtggatgacatgaccaagcgcctcgacgagctagaggcgtctctggctgctgcatcttcggggactggcgcgccgagtccgacaaaataaatatgaacgccttttacccatactccgcgcacagcgtttttggcgagagtgcaataagcgctacactttttggctgtccagctctgctgaacccctgtaccaattgcgcaacacatacttaattatggcatacatggtgttttctaaggctttgcatggaaccgccgtgtagcatgagcacaccggcctgtgtctggttctgatacttatgcttttacgatttcatagataccctacaatcaaacgaggatactcgtacagaagagccaaaccatgtttcgtcatttacttgcgtggatctagttcatatataacatggacatttttgaaagggtaaacccgaagttggtactcaattcatacaatatacagcatcaagcaaatattctcgtatacaattcaatccatttccattgaacccatggttcatagcatgcccggtcctcaatctagaatcaccgtgactatagccttaagccaaaaatccaagaggaaaaaaaacaatcatctagaagcaatgacaagcacttaaagctcatcgtgcttctccgcgccaacaaagctacggagaatgttgctgcgggagagaatgtcatccagcttctcgggggccgagccacccttagccaggaccttctggaggcgggccagctccttgacagcatattcctcgttcttgctcagcttctccgcggccttgacatagtactcggcgtacttgtcggacagaccctcggcggccttcttaacatcagccaccagattgtcgaacttctgcgccgcgacgctctcgctaacaatcttgtccagaacggcgatggtgcctgccaggctgtcaagaccgccaccgacggtacggtgagtaccagccttctcgttgatgaacttgacaaaggcctcctcggagcgtgcgccggagtaggcctcgggttcggtggagcccttggggaagaacttgatggtagggaatccggtaataccctgttccttgctcaaagcacgggaattctcggcttcggcgtcgaccttggcgataacaacgtcggactcgagggcgaagtcgttggcgagggtttcccagacaggagcgagggtcttgcagtctgaacaaaagacgtattagcaaaacaaaccacaagactagaggtacaattagggagtcaactcacgtccacaccacggcgcggtgaaagcgaccagcacatccttatcgccaccaacagcggtcttgaaagaagcatcgttcagcatctcgaccttgctagcctccttctgtgcgctacgaggcttgatgccagtcttctcggtgatgaaggcagacaggctctcgagatcacgaccacccttgtattcctcgggcttgtcactctttccatcgaaccacttgacagtagggaagccctggataccaaagcgcttgcccagcgaacggttctcgtcagcatcgaccttggcgatggtgaccttgtcttcggcgaaggcgaaggtctgcgcgagctcctcgtaaatcggggcaagggttttgcagtgaccgcaccagggagcgaagaattcgaccagtgcgggcttgccagccaggacaacttcgtcgaagttggtggggattaggtctttcactgcggagttgcttgcagtggcgacgccgctgagggctgagagggctccgaggagcaggaagcttaagcgtgccattgtgtatatggattttgatgtgagtatactttcggagaaagtatgagttcacaaagaaatgtggatggcggagtttaagctcgggggagacgatgacaaacaaagccgaagaggccacttggtgactccacaccgcagatcacgtccatctactgccaaggttgacatctacgacgtccataatataaaatagagctacttcccctatgctatatttgtgattattctgctcttgagtaatccaagagtttcttcttcgttttcttgatttgtttggtctctgttgctacctagatagttagtaatacactggagaattgctggtatcgtatttccttgggcaagatcggagctgttggcataaactgcaattgcaagctgcgcttgttaaccaagaatccccgcggtggttgatgggtgtcgttggcgaggtttgtccatatcatcgtctctctgccagccatttgtttgcgtcttcccagagctctgcttctttgaactccttgcccgtactctgtgtgcctacgtaaacctatcttgaaaattagcgtctggtcaacattcaacatcaggcaatactaaccgcatcccacagcttgaatgccaaatccaagtttccaataaagctctcgctgtgttggaaccattccttgccctttgccttgacatccgctcgagcctcgggagatgtcggattcgcctgtagaggtaggtcgtcgaggtaagttcgaaccgcaattccaagtccacagtcattatcatcaataaacggaagcctgggagaataggttagaacaggatacagcagagctaggctaaaggaacatacttgatagccatgtcagtccagtcgttgcggtcccgatcagcgtcaccactgagcagcagaccagccagtaccacctcgatcagattcctcagtgcagagcgcaccgcagaaatcaaagagcggtagcaaagaagttgacggcttaaaggtccagaatatccaatgctcttgtgctgaagcttggcaacgcatgcaacacgcgaaaccagcatattgaaggtcttgtcgtcttcggaccctctcatgggaccgccagatacatgtgagaaccagttcttagtgttgagaagacccaagcggatcatctcaatcgcaatgaatataggttcctcgaggttgtccgcaggatcgatggctgatagtgcctgcactagacactggccccacggagtgagcttgtgcttgtcgtcaacgtatccacggagttgtaggaagcgccacataacattagataaaatatcctcctgcaatgaaagtgcctatcgaagctgttagtcatcggtagtgtcaactctataggtaagcttacaggtgtttctttattagcaaatgacttggacgcaaactcagagtcacttaagctctggacagcaaacttaaacgacccgcgaggcgcctgaagcttcttgatactttcggggaatttatccccatggatcttccaggaattgatggtttccttgactgatgggatgcccttgaggttgatcgtccgctctgagttctcatcgaaccatgggcggatccgaatgactttcgtttgatagaatcgatgaagcgagtttgctaaaaggcaaatagactgggtgcggatgggtgtcaaaatctcacccacaagccggcggtaaatctcggtgtcttcggtacccagcggtagcgagatgcgaacttcgccagtcgtgaggaagttgggtacatcagctccaatgatacctttagagagatagaagtatagctcctctgggaggcgctgcccgataagctcatgcatatccgacgaggtattctctggatccatgggtccgactcgaccttccacgtcaatatagacatgatgcttcacaatcatatatgctcgcttatacaagtctgcgtagtgaagctcctgcatacggcgatcttcttcaaattgggcgcacagtgtcaatgcactgcgtccggctgcgttgaacatcggcaacgcatcacgaatggtggggcttttgccggggtaagcagggttctcaaagagtgggagggagcgcaggaagggggatcccagtagtaaacagaagtccaggaattgttcatttgaaagtcgacccagctcctcctggcaggtttgcttcgtgatccagaagaattgcgcgggctcggtgtcgatacgggtgaccagcttgtcaaggtcaaacaagagggcctcggagggggcgaaaacggcatcgactacaggattgctaccacgggcgaggtaggagagctatccataagaattggttagaacttacaacaatccaagcatggcgcataggtagccactcacctgagccacggcgctgtatggcgctacgatgaattccactccgttctgggtcaagattcgttgaaggaacttgaaaagtgtctccgggggcggggtgcctgagggttcggttgtgtcagcgattgtttgggagcttcgctgtacccagtggtaacgatagaggcccggcaggtccatcaccagggaaagggtgaaagaaggatagaaggtggtcataccagcactgctgaaggcatcgactacctggtctgcctgttgctggtcgtaaaggtcccaagcttggtcgaatgagcgcgtcgatgcgggctgggcgcggtgctctttcttgccgaattccaacccattgaagacgaagatagtggcgacaccaaggttcttgaaagtctgcaattccttctcgatattactcctcaaggcgaacgggaatccgcctagtgcgcctagaagcgcttcccgggttgactggttcacgagatgttggttgatgtagtgcgacgcatcaatgccaacaacggcacccttcagtgctgagaggggtagggactgggtacggccaacggcccattcatcgagaggtcggactagtcatggagataaaaggttagctggtgcgattgcgggttgtggagctgtgttattgcatactcggcatggttctggagcttgtctgtcacagggctgaaagcacggcaacgccgggcatcaaagcccgaaggtggaaacaggaggttaaatcaaaggatataagagcagatcaaaagctccgtgatcacaatatgatgaatcggagctgggattgtttgggttttccggaatgggggagggcgagatcacgagggggggaaggcggagttggagttgtccttttgttttttgcctcaaacgcatcacatcaatttgtttttcgcgtgtttcaaccacttctttttggtttcgggtcttttgtgggtgtattcgatttagttatgccatgttcaactcctatctgtgtattcagatcctgattatctgcttcctataggggaatgtacggcttataatgaagtcatgcccgatatgtgtttaaataggaacaaaacagtcacaattcgttatagcgtacaacaaaatcgtctagacaatgtttatcatccttgctgagtgaattcggcgtatatttataagatctatgcccagctcaggtgtataactaagcgggggcaatgacacatccggcggggttccatgtccattcaggtcggatatcgcctaactgactggagccgactattaaacaagaaattggattggttggacgcaatttgattatcgcgatattgaagatacgcgatagtcaatcatatgtgcactaatagtggtttcaaccctatcttcaactatatattcactccaaccttgaaccctaactgctgtcctatttctgtctcacttcagaatggcagacaccacagtcccaatcgagctccccgtcattgacatctccaatccccatgaccccgccgtggggaaggccatgctggacgccgctacaaagtatggctttctatacgtcaacagcaagggaaccgatttcaccgtggaggatgtagatcatgcatttggattggtaagacttgcattacactccaactgttgacatctatatgcataacatctgaccatctctatagtcaaagaagttcttttcgtctccctcacaggagaaggagacatgcaagatccagccaaatgtttgtaataagactaaaggcaaacaacacatccagtctaacaatatctatagaaccgtggctggtctggaatgcatacagaaaccctcgaccccgagcatcagcgggtaggttatgacctccaacccgcatatagtacgaagactgacacaggatatggcaaatagaccggagactttaaagagtatggaacaaccatatctccaagccttgaaatacccccaaccatgaactaaccacacaactagagccatgaacttcggcgacttcaaagacagcaaagcccaacagcttctgccaccgtcactggaaccccacgaagcagagatcaacggcttcgccgaactctgcaacaaaacctgcacccgaattctgactctgcttgctttaggtctagaggtacgtaacgccaccgagtctatacatccatcataaccaccacgcccagtcacataaatatgtaatctataccaaccatcaaccctagatccaagaagacttcttcacaacccgacacgacccaagcacaggagcgacaggcagcatcctacggtacctatactacccatcaatcttctcaccgacaacagcagcctacaagcacgataaggacgtgcgagccggtgcgcactccgattacggcagcataacacttctcttccagcggcccgggcagccagggctagagatcctgactccagaagacagctgggcgcctgtgcccatcgtgcccggcaccgcagccgaggcggaggggtatccgttcccgccgatcttggtgaatatcggcgacttgctgagttattggacggatgggctgctgaagtcgacggtgcaccgtgttgttttcccgcttgctgagcagcggagcccgaatccgcaggatcggtatacgttggtttatttctgtcatcctgttgatgagacggagttggtgcctgttcctagtgggattgttgctgcgcatcgggagcggactgggggtgttcctgctgatgggagggttggatttggaggtggagcggggaatttagttcctggaaagaggcctttgacggcgcatgaacatcttatgtcaagattggaggctacgtatgggttcactaaggatgagtgagggtggggatcacatagcttcaattttggcgctctacgaagcctgaattaccgactacatgtagcttactgggcattgggtagatgggaacagagtcattcgtgagactgggaataaattataaacgccggtgccgttgaggcatagtgcaaacacagaaaagacaggtcctccggacataaatcagaatcatagataggatgtgcaccaaaatgctccagatgaccataacacgacccaagttgtcggcaattatgcccatctactgacataggaaagtcgtgacagcgcaattagttatgagagaaaacataatggccaaaaaaagcaaaaggcaatgggcatattgccactggaggttagaatgagatatacagtcataagaaatggtcaaatgtggatgagcaatgaaacaagggctcggaaatgacgatccaacgtcaatggaccaagatgaaggcaggctgtgcgagaaagggaatatgagaaggctagacatataaaaggtatcttcgggtcgaaatataaacgccgccagattctgaaatgccatgcgcaagaggaaccttggaacagaatgaaaggcagacgcaagacggatatgacgctatgcgagtcggtatgcatggaaatcaaaacgaaactcctctggggtcgtcgggtcgtatcaaggggtcgtatggcaccagtgccggtggtatacccacgcggatttctggcaatctttgctgcagtatttggtgcgacggcaacgccgacatttggcgaactggcgctggaattcttcccacttgccacacttgtaataggcgcattggcggatgccacctctcgcctcatccttacggcagaggtttctcatcaccacgcacgcccagtattgcatgtccttggagtgatgtcgaacagtatacttctccactagggggaagatgttgaaatcctcggaaagaaggtactcgtcttcctcatcacatatatcagggggcgaaggggggcaggagtcgaagtcctcatccaaaagatagagctggtgatcaattttcaacttggggacaagatgggatgactggaagtatgaccggaggttgcagtatttggagacatatgctagtagctgaagagacatcaggacatcctcatcacggggcatggctgtcaagactccttgggctgcgggacgttcccgaaggtacaaagcgtaggagctaggagcgagagtaggagaattaggattgttggtagcttgggtaggagagagaccgagtccgccgttggcctgtgtgttgccgttattaatgatgctgccgtcgacagtcgaacgatgagtgatgttgaaagtctccacctccgggccgccttcagatggatcagtgacggttagatcatgggcgttagagacaccgtctagcatcgttgtgtcccgctcgtcaacactgtcaagttccatcctgttcgggagtccaacaatggtttcagcgggctgtcccatagcactatcgtctcccatggtcgaatcttcgccgtgggcatcatccgattcaccggacgccgactgctgctggcggatcaaaggacgttggcgggcggcaatagtctggggaaggctgcgaggttgtgagtggaggggaccacttggggtggtcggggagtcaggttgtgagacgattccggtctgcagactgggaagcatgctaggaagacgctcggtgtcacgcacaggacgtaatccgaatccatccgtagtatccatagagggaaccgcggtggcaagaggttgcattgaccgcaggcgattgctagcgcgcgggaaccgcccatcgttcaaccggtggttatgggcttcttggccaaatgtactgcgctccgggggagatgtcatagggacacgaggaggagatgtgatatccatggcatcggggtcgttaggttggctgtcttggtagaaaggccgggggatttcgatactcggcggaggggcttgtcgacgcgagtggtgcgactcgacctgcgggtgtgactcggtctggatatctacgtccataggggtggatcgagtggagacgtctcggttgctgctgggccttgactgcctggaagaggactgcttctcggaatcgagatcggtgcgcaatcgcaccttgtctaccaccttgatgtagttgttcagaatgctggcaatgactgggaccatgtcggcttccaccactcttgtcctcacactctcagagccccgtacaccaatgttgacaacacattgaaaggcgaggctccatttccacatttccagtaaatccttgctccgaccttccttgaggatgcataccaatcgctcaatgccgccatcgacggtgaggatatctcgaatccgggcggacgaggttgtgaggtatgcaagatggttgagagagttgatgagcggtaaagtcgatgtgcaatcaagggcacggcggtcatagagggtagtggtgatgttgaccgcggccttgttcacattgggaatactgaaattgacttcccgcatgatgaaagaatgaaaacggagatgtgacgaaagagcgagggatcaaatgtggtatcgatcgatgcaagatgacatccagagatcaaatgcaaaaatatgaggaccttgacggatattgtgtaattcagcccagagagattgatgccgactgcggattaggaactcgcgctgaggggaatcaatccaaagacatcaggtgaatgaagagggcgatgggttcagatttagagaggatgacccaagaagcagaagggggcgaaagggcatccaagactcagactcagagggtgagactttttaaggaacgggaagggcgagaaatgaaagagagaccaaatgcaatatgcaatgagacgatagatgcgtctacgcagtattcgataagatgatgaagattgtcgatggaggggaaggggagagaagaggaaggctttgcgaaggcaaaagcggagagcgtcaggtgcctccttaatattaccaaatatgggttgtacccgacacagaggcatttggcgccaccttgggggatttacccttccctcccttttttcccttgttgttttggtgattcatctgtacttgtacggaacattgtattctttgtttattcgcatttgtctcatttccgatctttgcaatctctctccagtactcgacccttctctgttacattgggtaccgacctcggagttgccactcgaatatcaaaattacatatccttcttcacataccattacatgccataggatcaatcgataactgtcagatcataatacgtacaacgagagacgatcgctgccagattctctaggttatgcctgatacagacggtacaggcggaggctgtagatctcgagcagtgaccatcacaatccaccacccgatgaactatttgaatagcttcggccgtttgtcctgaatagaagaagtttggaccgaaacagatagagcacgtagctgctgtccccataacaactgtgattccacaccacaaatgagttgtgttacatctatatatcggcgacgtcaacggcttcaaatgactagttaaatgactaggtcttaggatcaaagaaataatcgaaatgcttcttgtgcattttacgtcgaagctgtttatgcacatctccaagtatgatatacattccgtcactattgatactacgatatatgatagtccaaatgggattcaaatggctcgtggaacagaatcttgaaaatataccacctggcctggaccctctgacccctgatggctacacctataatgtgtaatattggtggagtctagtatcccataacctttctgatactccctgatgccgtttcatcagccctgaccagggtagtttattttgagaatgtgtttaaacttagcaacaaacaactgacagcgacttgctgaggaccaatcgattacccccgcagatgtgatagcgttggcccccaaggcctccatcacatcttgacagggtttacaggcgcctgcaacaatgtggcgcacagacggcgaactaagattagaacacctgcgaactgccgaagggaatccatgtccgcctgtttgcacctcgaaattttttgggggggggatcaagtttttttcgtttcatcctagggcaaggctttgagaaagacaataatagcggttatatcggttaggggagggatgatacattattataggcccctgcgcaagatcgtcaagcctaccccgccagactagctcagttccattggcgaatttcggatattggattggcttgacaaaattgctagtgtctatggaggttcatttggtactagcgaaggctacttctgcagcctgctttgtgtatactccttacaaagtacattcgtcttcgttctgatcgtcttgtctataaaaggggcagctcggtccatcgtatatggcccctttctcataagaagccaaacttagtcgccggagtatgaggtataaaaggcactcccccagagcatggcaagagatgttcgtgcaaaggattcctggggaatttcaacatccacaagttactaggatacaatgcagcgtccgaatctttgtaatatgtcttccagcatccgttgatatgcaaattgcttattccatagccggcgagtacaactatctttgagacattgtgttattaggccacaggtacacttccgtgtaaggagtcaggtctgggagttgaatctgtgcccgcagccttgtactgacacgacaacgtgctctttggaacctatacactcgtgatacatcgacttccgatcgcctgccacttgagtaaccggagagacgccatatactcagtagatctaatatgcacaatgcacgtgatgttgacattcattattcctcaagaaggagggaatggtcagaacttctctgagataagccgcatcatctcgttcttgaatcagaatgttcagtgcagggattcggatgtgtcttgtgatatgacgtaaactataactggttctgcttgggttctcatccctggagctgagggcgtgggaatggtgacacagatattggcagtctctcgtactcggtttcttttgctttcttccaaggtttgtcataggtgcttactcaccatgttgtatagttttgtatagattgcctaggagtatgagtcaatatatgactgctggaatatcaacggcatacagtgaggtccgtttcagatcacagccaaataatctattagacttcggacatctcgatctcggcgttggcgggtgcctttacagcccgagctgagatgagttcatctctctgatcgagggtttggatcatgactgtacgtacagactaacccatgttagaccgacaggtaatcatggctttctaatggcgtatctgactacgttgtgcctgaaaaggggaaaacaactattgtcgattcgctaagataaaagtggacaagggagagagagagaggaagagggagccgaactatctgatggtgatctgggtccacatgggtgaccgccttccggtcacccaacatcccccctacagatctcatatctcctgttttgaaaatgatgatcttaaaatgtcgtaatcgtggtagtcgtaaaaaaccccaaattttcctttgaattaagtcatcccaataagcttcaagaaagctcggaattgctctttaggaagcgccttcgtaaacccgtccgccgcgttctgctttatatcaacccttaggatatttatatatccttaggccacagcgtcctttataaagaaccatcggagtgccagccatctggtagtagacttacctcccttctttattagtagtaactgtaagttaatattattagtatagataactgtaggatcgggtcttagtaggcttagtaagtctataaccttagtaagccatatagtatcccgggccggctagttaagtgtatactattctactattattatagagttcgctataatcgtctactttttagtagactaagctactaggactcctataaagaattagatatatcctttagttgatttagagtctatctagtctacgtataatacgtctataaatactataaattgtagttcgtccaactttctaaagattagtcctatcttagggttatatctaaggtacttaacgatatatcttattgccttaagattagaaaaagtcggtattactagtctatattataggtatataatagtgaatctaatatctagtcttatcttaatagtaagctagttaagtatccctactactatttagtagtattcgaaattctcgttatcgagtagattagagttaatatcttctaggttagactctctctatcctagtagtagtagtatttcttttatccttatagtatctgtaatatatagaatcttttatatataggcttcttaagatataataatcgtcctagcgttataatctctattaagtatatagttgagatactattttagttctcctaggtcttttatattataatatttcttaagttactttataactaagtctatttctctggaagtaggtatagtaataataaagttattgatatagattattataattattagatctatatagttctttcctatcttaatatagatatacgggttatccttaaagggtctaaagctagtttattaaagcttatagtctatctccttattctaaaggaaggcagagtcttataggctaaaaagagcctagttaagtatatatacctattactttaaatttccttctatatctataaactcgaagcctattaactgtcttatatatactatctctatatcttctcttaatatattaaggtaagctactataaaatccacttaatactatttaaggctatagactacaataagtattaagacaattttaattatcgtttctaatataaccggtatataagactcacttaagttatcgcttttctcctagaagttactatagataacctatcttaccttaaagctatagactttatctcttatatttatcttaatagtaaaacgctattatcctagaaggacttttacctttagtagttttaggattaatatctatattctcttcgcagtaaggttattaagctatttttctattacttccttctatttattctagaaaggtgacttttatatttatttaaaacttaatagtaggttaatatccttattataaagaggttttctgttatagataaaaggtatatctatatctacctaatcggagttatctagagaaagtttctttacatttccttcttaagaagtaatatatttttctgtatacctggtatctctcttttacttcttatattcaatatttaggagtttttatttaggatcctaatatctctctagtaggatactaatatttctcctttttaatctcttagctaaaggttcttaaatttaagttagtactactattaccagttctacagtaggtataataggagtaaccttctcctatatctatatcggttatatagtataccgaggcactttataagtaccctacggtaatatttattatatagtagtttcttataaactacgttctagagtctattaagttagtaaagagaaaggatactagtactctatccttatctattctaggaacagagtatcttcccttagggttaactcttatatagagctggtttccctaattaagtcctattcgattaagtctatatactagtatacttctagtatatctatctcttctacattaattctagctataagttccttaagtcttctctagaaattagctttcctctctgctagcttctctgttattattatttactctatctaagggattatattcttactataaatagcctatatctcttcttaaattagagtaagagtctggttaactctttatactattaactgttctatatttataggaattagtatccctttctaaagtctcttaaggatcgatcttatataccttagtataggaagtaatctctattaataaggtattactagggtctctagtatagttaaaacactaccttaaattataggtaagtaaattattaatagggttactagatcctatctatagactattataatctctatccttagttcagttctagctatattaatcagtaggatagaaatttcgtttatattattatctcctagaggtttcgatagctttagcgctattagtactcttccttcctaatctttatcccctagttaaggaaagctgatatcccttaagattataatcttcctagtttctagattctagatttttagaatatatctattatcccccttataacctataagttatcctttctaagatcttagagtggctttatatacctatactctcttctctttcagaatatagatatagatagttgttccctatagtctaaggtactttagtaacggatctaggttatcgattccaagttctgtatactagtatttaagtagcaatatttaagactttagattggttaatctattaatagtatagattatagtttctactatatagggctatagctccttaggtagcttagtgttaataattattattctctagatatcgttaatatatccgctaaagcgttctactgtaccgttaggctctactatatagggtggtataactttaaaagttattcccttttttataccctaagtaataaagttcttaaattctattctactatcgagtctttatactctggggtagtacctagttcggaatttaatttttttataaaatacttaaagtttaacgaatgctttacctttatttgtaagagtcagtcccttaagatatcttattgcgttattaagaataggtatctagtacttttcactatttaggcccttaggttttataggctatatatctatataaaatttctatactatatcctaaacccgaaattgtggcttataagaaatctgtttcttagatttaccttaaaaataagctttatagttaaagtattctattctatactattctttatcgttaagctcttatacttattttagtattaaagtaagtttagcttttctagtatatctaaggtatcgatacgccttaaaggtagaaattttattaactaatcctatttctttgttactatctgacctataggataaatcttttttatataaattgttttctttaggactaataaggtatagaactctgagtaatatatttataactctaacagtttttctagtactatctgtaagtcgcttagttcttatattatataagatatcctattcttctaggagtttctatatactgaataatttactataacctcttaggctatagtagccttttattaggaaggtatatattattctatcttcgagatctactttaataaggacctctctatatcctttagttaccactctattactagagtagtcctagtaggtatataccgattctaggctatccttctagtatatatagaaatcttcgaagttataggtaagtattttatctaatctagtattaattagctagctgttaaaactatctatataataagctgttactataatagctatattactttgtccctcgctttatagtatgatcgagtaattctatatatataggctatatatctagtatataggtagatcttctaatagataggaatacttttaagctttatatggcctaaaactgtagtaggtatatatcccactcttatctctttatattccttccttcttttccttgatatacttatagatatctttactaggaggtagttagtttcgaagggtcttcttcttcttaggttcgttagatatatttaagttatccttcgaagatttattatcttagcttaaggaggtttcgctattacctcctttactatccctcttatcacctcgtcctctatatcctttactatggttattaccccgttcccttaaggactaggctgtattagtagtcctttctctatcggaaactgcctagaggctcttataatattagtctatctttttgagtatgattttcttaggttcaatattactaatttcctcgataataaattaaaccttagatatttctttatctaattattatagaacttataatagtatataaaaagggtgtggttaaattttgaatcgcaaaagaatgtggtattatttctagtattctataataaattccttcgcagtattaaagtccgctcgttttattttatcgaactttttagttttatttagcgtattttcggccttatcagagccttatactattaatataattttatcgaatattatattagcgaattctaggaggtataagagattctggattcgttcttagagtatattgttaacctaaacgtatagctagctagctactatatataaccagtactcctatctattaaatttcgggttacctacagtagggcgaggtatactgctattaataatatattctagtcttaatagcgcgagagtgaatttcacagggatcgcctatttataaggatttctggaattgtactcgagtgctttaactttctacattttcgcagccgagatatcaggtaggttagtggcctgattcttcttattatatctattacccgataacattgtattagcctggggttgagaggtatttcctatctcccgagacgcgttgttgttacctgatggcaaaaattgtgactgattattcgggttgttatccctagagtcgataccgctatcagccatgctaggagctggtttaccaattctgttattaattgaggcttgcgaggattaaatccgattggcgagaaacgcgcgttatgcgggttaagcgccgggaagtggggtccaggaaagagacttagggttggaggttgctagcggtccttgctagctagagacaagtgctcataacctaatggcgtatctgactacgttgtacctgaaaagggaaaacaactagtgtagattcgctaagatctaaatggacgagggagagggagagaggaagagggagtggaactatctgatgatctgaacccacatgggtgaccgccttccggtcacccaacacatgagcctcattttgtatggttgctggaatttaactacagcccaagttatcaaataggtttatgcgaaatggtcataatgatatctctaaaatacggattgttgtgacgcccccaaacagagacacgacgatgcaataaccactatgtgacatgaaacatttcgaaagttgtttggaaacgcgcagattcttcgctgtgattgacatgtgatcatctgcctcaactgaacgtcccattagcaggcccaaaatacccgacagctggcatcgacttgtatggtacaccctgggcgtcggcagtattcaagtacacgttattcccccaccagtcagggaaagtggcaccagggtacgagatgcaaaagaaaataacaatgccactgagggcaagacctgtatcaagggcagctgccaagatataattgtacttggtccaccaagcaaagaatcggcgtttaataaagtgatacactttctgaccaatggatgttttagaaggttcgggatcccactatactagttcaattgcctgttcgtggtttaatatagatatgtatatatgtatgtaattatggagtaatgtcactgcaaatctccgatgatgagcatctgcatgacagacgccatgtcgaagatcccgagtggagatcttggcaggagaggagcacatggatattcactgacagggacttgcccctgaacatccatggatgtatatagaatgacgaacgtatatccaacggagagcaaacgccgaagactatatcgagccgatcttccccgaaatcgaaatgcaacgtcgcagataatgatcgtccaacagtcagccgaagattcccccgggccggagttaaaaaagaaaaaggggggcaagacagcacaatggattgtttggtggagactgggcagagatgccggcttttggctcggagaaaaaggcccagaataagaatccttaaaagaatcctccaagaatcccaaaagaatccctgaaggaacaatccctgtttaatttatctctttaaattgcgcttaccaatgtcctggaaacggttggacccaccagaacgggagttgaagccgaatggcacgatactctagggctaatatatgtcatatacctagacgcttgctattgcacggagttctccgtgcatatctccatcatatccaataattgtgatatgagttactttaatagccaatagatcaatacggacgtactccgtatttagccacagggccgtgcaccctgaacgaacgctcagtgtgaagcttggacctgcacggagtacggagcaggtcaatattgtttaagcatagattgggagttggggatcgggagaagatcagagataaatatggatatggcagttgcaatcatgcgagaatatcgactcatgtctggaatatagggtcatcttcttcacataaagggtaactgggacataaaaccggaattatacccagaatggacatggaggatagtccaatctccgttagctccataaaaattaccttctatgcaaatggaaaaggggaacgcaacgcaagggagtccatttagctcgtgaagaatgtattggcgtacggtacttgatatgtcctatgatacaggttgttcagagccgccggcggttaaaccgtgacacttggagtaaatcactctttgccgctgttactggctggatttacactgtcttcagtctccgggctagtggtcttagcacccagccgatcctcaacgccacaatttcgcatattctcctgagatcaggagggttcaggagggtttaggagggtttaggagggtttaggaggggtgatatttttttggctttgaaaacttggaacagctaactatgtcagcacaaagtacctacctagttaggtatatgtacgtcagctctagttcgaatatcaaccaaagaaaagaaaccggcatcaggtacccgtaaagcaatatagagtccactgaaagaacttgcagaatggaaatgaggaaactctgaactatacggaaaatatgtactatagtggctcacatatgtcacgatttctttcatgcagtacgggaaaaatacagaaaggtactttggatggcatacaacttgatagcaactgaaagtaccctgcttattcccatgtctcgtattaccactagtaatacgctgacctccctctccttgctcggtctttcaccccctgttcctctctctctttcttctcggtctgttccttttgttcctgttggctctttttccctattctcttattctcgacttttacttaacatattatgatccaagcctaaggccctttcactcggttccgcctttcgactttctctcccctgcttcttcgctccacaccttccattcagccccctctctacccttcccctctgccaatctttccgaccaccattgttattatccggggtacttcgacaaaatggccgatatgagcggcgaacagatgcaggccaagatcactgcggccaggcgcgaagctgagggtttaaaggacaagatcaagcgcagaaaggatgagctggccgatacctcccgtgcgactcccatcacccattgttatgcctaaagggtttcctccccttttcctctcctgggctgtggtccagtacatcgtcctaggagactcgattaaccatactgactttgctctcccgtctagtccgtcaagtcgcgcagaaccagaccgacgccctaccaagaattggaatgaagccccgacgcacgctgaaaggtcatctcgccaagatttatgccatgcactggtccaccgacaggcgccatctcgtttcggcttcgcaggacggaaagctcatcatctgggatgcctacaccacaaacaaggtccatgcgattcccttgcgctcgtcctgggtcatgacctgtgcctacgccccaagcgggaactacgtcgcttgcggtggtctcgacaatatctgttcaatttataacctgtcatcgcgcgaaggcccgacacgagtcgcgcgcgagctttccggacactcgggatatctctcctgctgtcgcttcatcaacgaccgccgcatcattacctcgtccggtgacatgacctgtatgctgtgggatatcgagtctggaaccaaggtcaccgagttcgccgaccacctgggtgacgtgatgtcgatcagcatcaacccgaccaaccagaacatcttcgtttccggtgcatgcgacgctttcgccaagttgtgggatatccgtaccggcaagtccgttcagacatttgccggacacgagtccgacatcaatgccgtccagttcttccccgacggcaacgccttcggtactggttccgacgacacttcctgccgtctgttcgatatccgtgccgaccgcgagcttaatacttaccaggtaattattttactcgagacatttgattgacgaaaactgacttgatattcttccagagcgatcaagttctgtgcggtatcacttccgttgcgttctcagtctccggccgattattgttcgcaggttacgatgatttcgagtgcaaggtacgctgagctttttcccccgcaacacgactagatgctaatctacttaggtatgggatgttctgcgtggcgacaaggtgggttcgctgagcggccacgaaaaccgcgtgagctgcctcggtgtcagcaacgacggcatcagtctgtgcactggatcttgggattcccttgtaagtttccctgcaattgtttatgcacatgcatctactaacctcggatattctctcgtatagctcaaggtctgggcctggtaaaccaaaaaaagcaaaacgctagataccccgtgtcgatcattctgcaatgctcttcttcgaaatattttaggctcgatggttcgaatcaccgccattgtacgataataatcaattaccggggagtcccttgggttcccacgataatacactacccgcggcgcagacatcgtcgcatgcgatacggaaggtgatggaggtggaggtgagcgctatgggatgctgtcccggcgaacaaacgatagcgatgacacaatacttgtttggacatgacgagagcgcgactagtccctgggtcgatggatgtacagtgactgccagcagaagggaatgctggaacgagtcgatccatccgacacctacaccgtcgccctcttctcaattccccttttacttctcgatgacgccctttccccttattttttcttctttgaattctttatcccccattcagtttaccgtttcgttctggtcatctccgcattggtctcgacaattattttgttggcaaaggcaaaaaagaaaaacctggttaccggattctagccaggatgtctctcgccgatctacctctgcgttaccttattattctctcttctcatttctcctttcttctttattctctcctatccccccttatttgtgtctcctctaaagaaagagtccgttgtacttaactgtctttgcgttggaatcttgctctgggattctgtggtgtcggattttgataatggttcaagcagctccaatttccatatgtgaactttttttttcaactcgatcttccatttcattgcactgaaggtggtgatagtagtatcgggaaacgtcggttcatgtctggcttgattctctaatgtgagcctggcgagtatcagacatgtcttgaacctcggtccagcctagggtagaacatgccatccctagatcatcctcgagggagtagtctctaaatagtcggatgggataccgtagcaggtagtacgaccttcggctccacgtatatcaggccacgaacacagccaagagcagtggctaggggaatgccacgcatgtcctcgacctcaatcacaccggtccacattcattgatgcctaacacgcagctcgccgattctgggatcgccttgccccatttctgacatgaaacaagggaatggacgtgtaggagggtcgtaccactgacgctagagagagggactaagacaatagttgtagtagaaaccttttcagaagactaggtcgaaataagaacatggacaggatcagcgttgtggttatccttataataagcatatacgctagaggagagttcatcctttcatatcaaaccagactgggaatacgaagatacgcatccttctagaaaaagaaaagaaaatggaaacatctagacctgaggattcattggtggagacatacagatctacatcgttgaatggggctaccttaaagtagacacttcgtccgtagacacgtcacatagttcgggatattatgaatgcctccacggggaatggagatcggagcatggagtagagctggtttcaaagggataatgaattggaaggctattgagctatcaagctattaagctattaaggtcaagtacgagtatgttagtatagcttgaaccgcttgatatacaacttgggcatacaacacgctataatattgtcgagtccatttatataaatctcgacaaaacattctaaaacaaatgtctttgaccttgacagcctcctagggctcggatgtcctatgtggagcctgaaacacaaaaaaagggggctgttctcaccgtttcatgacttccatggcttctcacgacgatctcttccaacctcagcctcatctccgtttcaacttcaggggcaatcttcgagtatctgcatatcctaatccttgatcctggtccaatccgaaacacaccaaacagtgcccgatcccagatctcccaaattagctcccccctctcacctaaaaacgcctttgcccgctctttcaacatgtccgcccaagaagaattcaaccagctggtgaacaataaccgttcacgcttcacctcccatccagaagaccaggaatcagaaccttacttctccgacgaagaacccgcctcccgcctccgctcccgccaaacagtcgactcctccgacgaggaagccgacgcagacatggtctcctcccgcaccgccaacgcaaactaccacatccccaacaccgtctacgaagccaacacaggacccaagggcgttatcgccgacgcccaggccttcgagcgcgcccgcaagaagtccttccgccgcaccctcctcagcgtcgcggggctcgactccaacagcgcctcctacagctccaagtccacccgcgatgacgtgcccctcgcggccggcgaccagtcctccgccagcgaggacgacgacgaggcccgcttcatgagcaagtggcgccagtcgcgcatgcacgagctgcagggccggaataatcgccgtgccagtccgcgcggtagacgctatggatcggtcgagacggttgatgccgcggggtacctcgatgctattgagaaggtgacgcctgacacggtggttgttgtgtgtatttatgatcaggaggtatgtgtgggatttggatattggatacaattgggagctaatttgttatgttatagttcgatgacagcgctattgtcgaggagtgtctggtcactatcgctcgcagacaacccactacccgcttcgtcaagatgcatcacgatatcgccgagatggatcacatcaaggcccctgctctgctggcctaccgtggtggtgatgtctttgctactattgtcgatgtcttgcgcaacattcctcgcggccgcagctgtagtgctgacagccttgaggacttgttgaagctgtgcgtattcccaggctcttgttcatttcgtactgagacatatgctaattctcgattacaggcaccgtgtgctatgatactttctttgctattatgttttcagtccgtccacatttatggcatagtagcaaggcgtcttggttgttccctcgtgatctcctctgcatgatttgatttgatttgatttgacctgacctgacctgacttgacttgaattgtctttcctttccttcccctttctttccctctcaaacactctctcccacctctctctttatgtcccatccctctgatgttggatgcactacctgcaataaaaaacccaagaacagatcttcttgaaacggcgttggtcactagaacaaagtgtacacgtttggactcggcaggtcgatggtctggctactatcttgccgtgtcatgttagacacgttgcgtttctcttccctccttgtctgattatgtccctactatttccagcccggccggagccgggcttgatgttgatttacacgagatatcccatgctgttattactgttcctgctctatcttctctctcgctggtaatccccttagactgagccctaaatatgtaaactagggttccgtatggtcatctgctacacccagtaaccgagaaggaacaaaaggcaagaacgaagggccgtccatgatgggaaggcacgtgggtttgggggaaggtataaaatggcccctcccccatttctcttcttccctcctcctctccatctctctgaccaccatctcaccgtagcctctacgagacagcgtcgacagaggatgatgtagcacatgctgcttcacctaccacagggatcataacattactatatttgttatgaggtccatgtaggtctgcatcagataacaaactgggctttctcgtggatgttcctgaagtcgtggctctcattgccacttgacgagtcccacggaatacatgaggggtgtaaatctccgtagccgaagacttgtacatatagatggtcacctagttgggtagtcacagtacactttcacatatagctctaagtctaggcttgcgtcatgggtctgacttatatgtgaattggaagattccattccaggaagtcccacagttctatgtgcaagatatcaagggtcacatctccagagatccaggcaaagagatatgaaagacagccccaagtgaaacaagcttgaatattggtataagacccatattatccagtgcaaagcatcgtaaggaaccatttacgtggttctcgaattccaagtctccctctcaagcaagagatgagtgaaatgtaccacgctcatatcccaccattccaccatccccgagaccacgagaaaagaatacgcgcatttcataagagaagcgcgagagcaaaaaaagaagaaagagccatccaatttccttcggtagtccgctaactccccgtgtcaaaagacagaaaaataaatgagaaagtaactagacgcatggccgtggtgaccaaggatacatagcaggtagagaaagaagcgaagactcaagaaatgagaagaaaatagaataaacactcccacgcctggtttctctcccctcttccgctcagtcggttgtctcttacagggctccgcggtccgccgtgaaatcccagagcattttgatcaacgcgtccgggagcgtgtacagatccacgtggaactctccgactgtagaaacgaaaggagaaggttagcgtgttgttcagagtaaatttcaaggaagcagagaaagaatacggagtttcccttccctgacacacagaggaacttacgctcaacatcgttctttgtgtatgagtccgccgccttgtggtcatgaaccatctgcacgacctgcaagaggtcatcttcgttcagcttctgaagcccatcggcaagcttgtccatgtcaaccttgagagggtgtcagtcctgcagcgccaacctcagacccatctcatagaaccaactcacattcttatctgtgcgcttcttcttcttggcgctctcctcgccaccagcagggcgcttgtgcttgataccattctcatcaccggggaccggaccggactcgcgcagcgcagccatcaaagcaggcttggggttcttgaaggtctgcaccacaaaacgcaccgttgatcagcacaccatactttcgctatcaggggaaattcaacaaactcacaagcacatgcttagattcataacgggtctgggcgaagttcaggtcatgttgaatcgtgtacgacttgtcagcagtgagctcgatcgacatatcgaattcaccccatccctcctcctgaatacggaacggcgggtgcttgaaaactatttgaagtggacaaatcgtcccacgttagcctctaatcggaaaacaacacacacacaccccccgcaaccttgatcgcgcggccgtgggagtctgggtcgccagataacccaaaaatcaaaaacacaatagggaccaaacataccctgcgtggcacgttcaccgaaactggggtgcaggtggtaggtgaccttgtcgaagatgttcgcggggaccaaggcgcccttctcgttcacgagccagacctcaatatgccatgatcgctgtggaaaaccctcaacctccgagggcttatctctgtagtgtaggaagaaatcccaagtcagccaatgtggtctaatcccgcgcgttttgtgtgcatgtgtagagatgggcgtgggggtttgaaggaaagagtggtggtttgcaaagcgcgcctctccctataatccttgtgcgcattatcatctttgtgtcctgtaagctacaggacggacgtgacgatagcgttgacagggtattgtgggaggagacagtagctttcagaccggggtttgcgaagggagggaaggcggagataggtagaggggcgcatacataatgttctgctcggtgatgagacggacagtgcgcttgacctgttgagaaggagtgttagtgtatgcaagcttaattgtgctaagaatggagaagacaccaggtttgggcttgtcggctctagcgacaaacccacagtccaaggccgtagatgcaagtttgcggcagttgatgagagggttagatactcacgtcaggcatgattattttattggcgacttcgggtcgtcacttgagagaatcgtgaggttctaaggttttgaggccgaaaggggacgttggcgtgcggagaggtgggcgtctcggagacaagtttgcgcggttgtctatcggagtgagcaatgagcgtaggatatcataactaggcaatacctcaatgtaaccaggcagtaaggtgtatgtagtgaggttggtctattgatatattctcaaggcagttgataaagcggtgaattaaccttggaagctcaaggaggtttgagaatatctccaggcctatgtttcatctgacgctctctcactttctgatgagttacgcgtttaatctaaatcgtcttgagactatttggatcaaatggatatggctataaacaaatttactagacttatagcccgagcattgttccagcaaagtgcaagcaaaatctaatctttcggttttaaaaatgtactattttgtattattgcatgcgtttgcttgttaggcatactcatcattacttttgtttgtctttgttctttttcttcagatatcttcagggtatggggtgatgtgcaggtatattggatggggaaatgtctatctacttcccggagaaccatcgacgttaggaactgccctccatttcgtagactgcatggctcgcaatagctatccgaggagcatcttcataactgctgcctcgctcgtcgcgtcgtatgggatggggtgggaatgggatgtattggggatgattgggtggaacggtgtgaaaggggcgaaattgggtaatttttcaagagcaagctccgggacggcgtacccaaatgccttggaacggcaagtgcaccataattgggtatgctcgatcctcgaagagtcagcaatacgagagaaaaggagttgtttactcttcggcgttgaagagcttctcgttctccacctgggcggtctcgaaagcatccttgaaggcgttggcgtctatacccatggttagcgaatgcttgaataaagttgggataaaaaaacttactctcgctgttagcgaaacggatggccagggtctgagcctcaggctcaccctcagagacatcggcggcggcgttccagacccagctgcggtcactgccgacgttggcgctcaacttcatgtcgggcacgactggaagatacatattagcacgagatcgtctttgggaaatacgagccgtgggggatctcactgtagtggttggcgcagaccttaagggtcttatcgcggcgcatgactaggcgggtcttctggttctccttgtgcttcaacagacggacgtcgccggtaccacgctccttccactccttagaatcgcggtcgaacttgaacagcttggcgcgcatcttgaaggtctgctcctcaagctcctcgttggtcttagtctcaaccttctcggtcaagcgaatcacgggctcgaagtggacatcgacggactcctcaacttcatcctgaatcaaagaatcatagtcagtatatgcgcggagctaaaatagtcattgacactagcatagtatggcttggttgcgacgaccccactatcgggtgacaggggcacaagaccccgctcccatcgcggacacgtccaacaacaaccgcctatgccaacagcatcagatgtataaaactcacctcatcgttggccttctgggccttggaagagccggagggctcatcagtaggctcctcggcctcctccttcttctccttcttggggccaccaccgaacatggagaacatgctgtcggaggtcttcacggtggcatccttagcagtgtcggcagccttctctgcggtagtagcgacagtctccgcaacggtctcagtggtagacttctcaccctcgccagtggcggtggtggtctgctcagtggtctcggaggcagagatggcggggtcgggcttagtctcggtgatgtcagacatgttgacgaggggttcaagagaatcggtttgaaaggatagaaagagagatggcagatttccccgggaggtaaagtggaatttcagtaacagataatgtttgttgatcagagaaagcggcgatgagggggaaaaaattaatacttagtttgggtcccatacctggcagaacccgccaccgcttttgtctgccaatagtgtactctatataggtgtgaactacatgcaacgtggggaaacacacatcaaagagaaaacaagtgaacattctcaaggccaaagtgggattacggtttaaataagagataccattgcgccgactgaatagttcgcatgaaaacccatttccagtacagttgccacccaccaaacctgatcgccataaacaaaaaccagtcctcaaccaactcattaataggaaaaagaagcaaatacaaagtcgtaaataagctcgttcatcatttcgagccaagggttgagcaatccttggatttgccggaccggaatcccataacatgtcgcgcacgcgactgagctcgatccagcgcatcacatttcctgacgttacgcactcgatccatcatgctgcgaaggtcaaacttcggcgctgacttcccaattcgggcccatgcttccttaacaaggcccttggcttccttgtccacgcggctagaccgcatttgcaacacagaagcagcacttcggaatcgctggatagtattgcgagtgaggacgtctgagatctgcttcgaacgtgataaaacggcatcgcgtgcatttagactctcacggcgtagctcctcggcatcacggcgcaagagatgggttctctgcaccacatctcccacgatcacctgcagatcggtggagaggcggccgtatacctcagtcaggccggtctgagccgtatggatttccttggcgaattgtgaagaaattccctgtgctgcacgcttccagtttgcgatcttcagccatggggttccgaagtcaacagtcatggtctggctgattggctgccttgacttggttgtaattgtcaagttgactaacccgtacgcatcctcacggttcaacttcagtgtgtatactccatcgaacagctgtgacaactcgtatgtaagagccttgttctctctatgaacacttacattgaattgtggctgcttcttggacgatgcaaacttatatgggggcttgatgataacatggcagtctccaataacctgaatctcaaattcgttcgtcattcccgatgatttctcagtagaaatagttggcacagagacatcatcggggattatagcccctgagggcacatgcaatgcttgcatagaagctgacggccgtgttgagattgaggtttgtaccactcgatccagggtcagaacagaagtggaagagacattggaagtcactgggaaggatgcattggatagagctgatccggcaaagcattgcgctagaaagacgaccagcactctaacagccgcatacccaatagagatggcaatggccgaaatgagagtcaaggtaaccagacgcagcgtgggggccaggtctcgggcccgcgtggcataggaatgtgggagccaattaccaggatacttctcaagatccgtaaatatgtggctttgaggaggcttgggagtatcggcagtggctttctgtgtctttctcggatacaggccaacaagagaagccaggtttcgattcaattgaccaggtgtgatgctctcgaaagtcttcaaatcgataggataccgtcgaaggactgcggtctcaccggaaactggatggcgggactccaaacatgtgtgaagactgttgtggttaagagggatcatctcgccggccatcttccacagtggctcctccgaaatcaccattgccgggactccatgacgttctaggaacatatgggcaagacgctgggtcttgaccgccgctgcatcgtcgaggccggagacaaagagaattgctacatctggtagagtccaatctgttgcagacgttatatggtagtcggaaccattccaggccgaagtgcaaaccggacgattcttgaacttcaggttcagtgtattaggtcggtccgcgtggggatcggccgtggcttccaaacattcgtcaaccaccagctggacatgaatcggaagaagttccgcgaaattcggaacagctccggcgccaaatgaggttggcacgacatgatatcgagaagattcagccgagttggtctctgaaccagcacatgagcttgagacaagcacatcgccgatcttgtcgagaataatatttcggaatcccggttgtccgacatagagcacgcggaagggtttgtccaggtcgagactctgtttcgtcatggtctgttgaagcgtggccatgaggatggagtcggttgaattgtaaggcagccggctcttcaattccaaggctgcagcaccttcaaagatgcggatagtatgcttgagctccactctctcgatctcgggccacttctcgggctccacgaattcgatcgaatcactggcatgggggaaggagggcttagtggttgtggtgctgtcatcgatggtacttcgtctggcagcaaagagggcaggcagctcctgggaggccgattcagtgcactgcacttcatccctgtctattccatcatcctcttggtggtcttcatcctgggcctcggcctcgctctcactgtagcgttcatcgaggcttgcaacgtcgtcagggctagcctggtcgatcaacgagcctgtatcggtttgttcggagtggctgccatcctctgaacgtatgtccgacacactcagagtcgcccagctatcactcagcgttttgggtgaatggtcagaaagttgatctgacgtcatgttggtgggccgtgaacgtgataaccactcctcgacagaagctgtcaggggtggaagagtcggatattgcagattcgaggcagtctgggcacggtggaaacgcctgtgaggcgagtctggatcgtcagtcatttcgccgatgtaaacttcatatagcacacgggtgcggcggaaacaggagcttagggatagcccaagcggtaggaagaaggtcaagaaaagcagagttagaaaccgagacggagatttagagcagggtaatagaaaagaaaagggaagatcggaagatactgggagtgctaggcagagactcagagagcccaaatagagtgataaggtgggtctgcggggagccggatgtcaggatgggtcaggtgcgtgtctgacttaaggaagtaagggcttacctaggtgaaggtgtgaaagcgacaaaggccaaagagaaaagaagcaccgtgaagatcaagaagtataaaggagaactgaaacgtagagcgttgacgaagggggggagttgtgttgcgataagagaatactagaatggatgacccaagtgacagtaatagtgggggagtacaaggtacctagcagttgtatgatggtgtcacccatgacagaagtactgggtacaagtcactttgctacctaacggcaactctctttgtctgcccctcgcaatgcagatgcactccaaggtactccaatatactccaaacgagagaaagtactaacttactaaacctatcatctctctttctttctttctacctattcttatacttctctatacttgataacgaatagctccactgtgccccaccatgaacactaaaaacatgaactacacggaaatgaaccgcgactggaaaaagacagtctagattgatctagttcacttgcatctgagaaatccaactctctgagagtagtgtcatcttcaccttgctcatcggcgtatgacccgaacaaccctgcacgtgggatctaaatattgaggatggcaatttgtacatgctgatactcatgtgtggtcttttcgacaagtaatgtcaagtgtataagcttcactaggagaacaaggaaagaaaataagagattatagattgaagctaagcgaccgggaaagctctagatgtaataggattccttgactacactgaagtttgaccggagccctcatatattttatatttctcactgtgcgcactatatgcctgattttatgcatatatccaagaatgacgtgcgcctttgatccctattcagaaactttcggctcgtataatgccccaacacagcagaactcctgacagcgcatgtagataccaataagcctcgatccactcggggccacgtgtactcggtcatcccacagccttaggtagttgtcagcagacgccgcatccttgcaccccattttcagtcaggtataatgaatgatacgggccatttcatggtgcaggtcagcggaaagcctaagcttctcgtaacgaggctgctcattccgttcaacctcgaactcgattcccatgagcttgtgctctgtggctgcaaccgacaagccaagaatccgagcatctggtgcgaaatgaacggcttgacgagtctcggtatcggggtcacttgtgctcgctgtcttacctaacgtgtagacgaagactagtccgactattgcctggtctttgaagtaggtctcggctgtgattatagtctctctacagtcctcatcattctgcctctcaaactagtgtttccgtacctggtcaaaaggaggtacttgttcggggaccaatatgagggcttttgggcgacttctattcgtaaagatgacagctcggacgcgttcagaggatgggttcaatatccaagagatagctgtgagtcggattcaccctgatactggtggcgttgcagcgcttgggatgacatggactggaagtccggagggcggaacgtcacactgcgagaacttgtcgtctcgatgtgtatagctgcgactttacctatttccaaccccagaagaagcctactggaacgagccagatagtcaagttcaaacccatcatcgagttggtgaatccattgtcctacggtgccaggacttgaatggttataatactcgagcttcaaaccggacatgcgacttcgagatctggattgaccttgtatgcccgtagatgcatgaattttccggacgttcttgagtgacgaataggtctgatagtcatcggaatttctactgtatatgaaatgagtgagtagagacctcgtacttctgcataccaaggtcaaatgcgagagtgtgaagacgctggatcatcatcactgtaggggtcgggcagcgaaataactccgcagagagggcagtaaacattgggaatcggaatcatcgagatatgggccatacgtttcatatccttgctttgaaatgcacaatcccctaatctcactagtgagtattcaaacggtagaacatgtaacaaatatcttacatggagagctgtagaaatctatagacaggcagtccaaaggatgggtaggatttaggcatacaacctatggatggccgggatccggataattgagtatctccggcctatggcttcagaaaggctcctagccttcagacctgttcaaatgtactccgtgctagtagatagctagtagatggaatcatgattaggcttcaagaaggtggtgagttaatcaacgaaaccacttgacaaggacaccaggtcctaaacagagatcttctccaagcgcccggacaagccgaacagttgatgaaaaggagttcgcatcgatcgggggtagtgtaagcccaatgacactgtgcaacgaggcatatgcaagcatagaggccaagtcgcgaggtccaaatattggaataatcatgacgttctgcaatgcagaactaccagcgattaaactggcaagaacagatactacacttgatctaagccagaggcaaagagagctgaagaagaaagaaaagagaaggaagttctgggggcagggccaccttcttatagtcatcctaagagcggtcggcttctgccactattcacaaatgagacaaacaacgacatatgctcgcttaagaaatggtaacgtgatgatgagaacaggaacggtgtctcttatttccggtttctttgatgcgaggccatcatgtttgtttcttctgatatcagcacgagaagggctactgatacaatcacacgctaaacttgtttaggtatgtctgccgctggccgcgattctatatccaataagagtatactaaataatttcccttccttccatagatattggtacattcaattgtattacttgaaactgtgagtagcacagctggtaaaaacgactcttctatttagaatttaaatgtccaaaacatagtaaaaccgaagaagtaaagtgcattatactgatatcattcttcacgtaattgaccgagtgattattccatactctatagacaaccatgcttgatctggtatttgcgagggtcaagggtgggcaatgcgagaaaacaacccgtggatgtatgccacggattcaaggatgggtggggagagaggaaaggtatgtacatttcatgaatgcatgctggaagacaaaccacaaaaactgtcacacggggatggggatgggaaggggggaaagctgctgagaaaagaagtggccgatggggaggcaaaagaaatatggcacagagacgtggcgggagttgcttggggcgttgctcccagcctccgaatcaatggtctcctaccaccgagatgaaggtgtgctcctggtagaacataggatatagtgatgaaatctggagaaaacattggatataatggttgtcgagaccacatggtacagtaccaatgttccactgccgatgacacacaatttcttccaaatagaaccaagggatgaatcacaacagccaaacccagtggcacagcatgcttgatgaatgtgacaacagtgatgatggaaatggtaacaccatcttccgataataaaaaagttcagatccgttgaacgccgcctaggaaggaaaccctatgaccaacataagatgcaggctccagctggaaactctcgagggcggacccaagggatgcatgcagccgaataaatagacaggggagaaggagacgcagaaagacgtggcaagcactgagcactacggcaccagcatcaagatctatggcgaggcccagccaccagccacgtccacccattcgttgagacagctgccttgcttgccctcaacatcgacaatgtcagtgtcgcagcggcatcggcaaccgacaccattctccttgacttggtcagggttagcccagtattcgtcttcctcgatccgtttcttctcgtcatcggtagtcttttcgaggtaagggatacgggtgagttggcgggccggagcgttggccgggcaatgctgaatggtagtgtggcggtagccaaagtcacggaagtaatgaatatcactaggcgcgaggagagcacctgcggcgagagagtgaataggagcatcgccccactagtacagtcagtaaagatcccctggcacagtacaaagacataatataacatacccgctcattccaaaatcctccactttggtccatcatggtgaagaagtcctcatactccttgctgcggaaccaatccaggcgggcaatctcgaagttgctccagaaatggcacatgttgtagctctcgccttccatggcctctgggtctacgtccttcagattgttgtcaccggggtctgtctgcaggatttcatctggcagtttgtcctgcttgttctcttcgggagtttccggttgctctggttgctctggctgctctaggaacatttcccacagacccttggacttgaggttgttcttgcgcttgtaagcggccgcataccggaagatgttggggacagtctcgcgaagctctttcactgcaattgtaaagccataggtcttgtttgcctcggccatcttcaggaatggatcactaaaggtatcaagtcagcagattgactagaaaaatacgccggagtaggtatcttactaggtgatgtcgcagaagtacttgatctcgggctccaaacgccagtaccactcatacttcatcagcagagggtgcttgtagaagtgtctatcgcaaagttagctttataatccaagtccaaatctgccattgaagactgaccctgagtagaatcggcacatgtggtgatagctttccattccaccgtacatgatggcagcgtcaccctgcttcttgatgccctctttggcaacctcatggtcaacccaatcagggaatccccacatgctgttgtcaatcttgccgaattcgacttctgcgctggtgtagttcttgacggttgccttgaactcctcatcgaagtcaccatcgttgaggaaaacataggggtagtgccaccaccggttgaagtgtctctcgattgacttgagcgactggatcacgccctccaactccttatttctggcaaggacgacgaaggcggcattggcgcggggagcctttgcgatttgatcgggctcaataggcatacagcccgtagcaaagactttatcatatttttcgctgatttttctgtagaacgcgggaggttagttatcgcaccaaggagcaccaattgacagggcgatacgaaccggatagatggcggagtgcccgctggaattaggatccccccgggagaggcaggatgtcggacaaagaggagcagaataaggacaattacaaggcatggaaatagtaaaacaagacccaggggtatagaaatagatgagttgccctttaggcgaatccgccttcggaaaaaggcgaatctaggatggaggtggcccttctcggttggaacatcctccaacggcagactcggcgcgctgggcagccgtttcgtgatgcgttggatgaagctcatgagtgcgattattgtgagaccacacggatgattgtagcggtcagctgtcaggcccgggcgacagcacggggccgttagggagatagcggagatattgtgtcgggggtgtaatcagaggaggactgcgtcttgaggagaaaaaagttgagcacacgatcagaccgaattcggaccgtatggatcacagggaaatccgaaagtcaaaagatctcgagaaaaatggagaaaatgacagcaaaacgagtggccggaggaatgcctcctttcgtcccccaactttctcagtcccacggtaaatagatggggaaggcgttgggagaaacgcgggcaactgtgaacagcaaggtacacagaggagagatcggggacatcaaaacaggatgagggtgatggggggagagaagatggggaattggaagacgggatgggtcctaaagggctgcttgcgcctccctggtcttggcgaagtccggtggcctcttgtcaccctgagacggttattttacccctggttactgtgaagtggcgttctacctggtatggtatggtatgtatggtatttcgtggtatttcaggtgatcttctactttttgtgcgatgtacggagtattcttatattgaacctcatgtttctagcatattccctatatttgactcttgagtggatttgatgctgtttatttaccggattcaggattggcctcttatactaaggggcaaggtggttcagacggtagtacataccactcgtattagcccctaagctaacgaggaaagcttttgtgcaatcattttgatcccatctgcgaagactatgcttgtgctcgtgtgctttctatgttgtacaaactcttgtacctgaatgaaaaaaaatccgatggtgcagcttattgtatgtagtccacttgatccaccaatgcttagccctacaaggcgacacatagaatatgcgaaggcaatgactacgggtatggatacttgcctctggaatgtatcagttggcttaaatggtcttacacatccttccaagatttacccggataacctccaactcggagccctgggacgacctgtttcacatcacatgcttctatgtagatacaactcgttgaattagcgcatgacgatcgagggtccaaactttcgcaggccgttagacccgaaaatagcagcaatgattattgtgggcatttgaccctgtcatctgccattcagtctcttttatatgtggcaattattgagttggttaagtatcaagtacatgatatctcatgataacaggggtctttatgcaagtactagatacattatattatcctgccaatctcactacacgcatatgtgaggcaaatacggtattgtactgtatgtaatgcaaatttcattatccctacgggtctcctccgaggtctggaccgggttatctttcttaatttgcacgaacaaattgcaaaggagcggattacggagtatgttattgtgatatcttatggagtacatgttacagagtacgtcttttggctttttcccctatatcaccgacctacatttatagtagctacataggtacggagtacatacggagtacatgtacatatgtcggtagactacgtagtacgtatacatatttgttttgctcgtgtgcatcgaagaaattactcgaaggaaacagaattccaacagaatatatttagtttagcacactaaaatacaccactttcatatcaaagttatataatttcccatgcacactgtagatcccaacttgcttgccgggaagccaaaggaccaaaaggcttggttccggatcccggtcatccccccatcaccacactccgcatgacaataaactatatggagtcaccaccgtggggtgcccccttttttcatttcttcctttctacatcacaacatgactgcagtggtgaccaggcccttgtctgagggcaaaaccgcgatgatcaaacctccggaacccggcccctcgtcccatttccacaacaatgggaatttggatcccttttcgccagtcaacgagaatggaagcttcgaattcgatcgagtcttgaagacagggagagtgtgtcgacgagtcaagcataaacacgtctttcgcgcctcatggaaaccagcctacctcgtcctccgaccgaacctcctttccg
